United States Patent Application Publication US 2025/0295137 A1 - sequence listing, part 18

SEQ ID NO: 18 - DNA, 2057005 bp, Latilactobacillus sakei
  source 1..2057005: mol_type = genomic DNA
taaattgagcggttgagacccttcaatcgttttttattttcggcccgttggtcaagtggttaagacaccgccctttcacggcggtatcatgggttcaaatcccgtacgggtcatcttttatgccggcttagctcagttggtagagcatcggtatcgtaaaccgagggtcacaggttcgactcctgcagccggcactaagtgttatgcgtgtgattcttgttaagcactgttagtctgaatgactagcagtgcttttttgttacctattaataaggctcaaaaataagacgttgtccaatatttgcggacaacgtcttatttagtttaaacgatcattcacccactgccataacagtagttgtgttcggcctaaaattttaccgtttgctaatatctcagcagctcgttttttatcaacccaaatgctggtcaattcctcagcggattctaaagccgtttcttgagaggggtgttgatcgattgtacagatggctaaagtgatggcaccatctgtaatacctggcgtagaatagctaggactaaagatttgatcaatatgaacaccttgatagccagtttcttcgacgagttcgcgctcaatggcttgttcgactgtttcaccaggttcgattaaaccagctgaattaccgtagacataatcgttgagagggagtctaaattgtcttaataacaagacctgactatgatcatgattgagacaaaacatagtgacagcagaggccgttacgggatgtttaaggttgtctgttgttaaattagcctcacgactaacaaagtgataattaatctcctcttgtttgggattttgataggtagcttcgtaataattaagccaccgatccgctaataactttttaagtgcaactaatttgagttgtgtcacgatattcgacctactttctatttaatcattgtactacaaagattcctcaaccgttcacccataaaataattattgaatcgaagtagattaacaaaattgattatgacttagataatatattagtaatcactgattactagttaagaaagtaactgttgaaaataagcgaaagcagtaattattaattgccaaaacactagataaatctagtgaaaaaagttttgaaagttagtcaaaaaatacataaaaatttaaaaaaagaattgctttaacattaaaataagattataatgtcatttatagattctaagcgaatgataagagagttcttgtatagtgccgatttcaaccattgaagtccctatcttaacagctgtcaattcctagtttcaaaaataataaagttttaaagtggggtattacaatggaagagaaacatgaaaagacattctttggccaaccgcacggcctatcgacattattcttcacagaaatgtgggaacgattcagttattacgggatgcgtgcaattttactattctatatgtattttgctttagataagggtggtcttggttttgacaaggcaaccgcaatgtcagtgatggcgatctatggttctatggtttacttagccagtgttgttggtggttggttgagtgatcgaatctggggtagctttaagaccgtcttcatcggtgggttcttcattatgttgggtcatattgtactagcggtaccgatgggcgcaactgctttatttatttcaatcggcttgattgttgccggaactgggttattgaaaccaaacgtttctgaaatggtcggtggcctatacagtgaagatgatcgtcgtcgagatgctggtttcagtatgttcgtcttcgggattaacttagggtcattcgtggcaccttgggttgttggtacaatcggacaacaagttaacttccatttaggcttttcattagccgcagttgggatgttcttcggccttatccaatactaccgtggccgttcacaatttagtaaagaaaattctaaaccaaatgatccaatcgcagcggacgaactaagagggattatcattaaagtggttatcggcttagtcgttattgcacttggtattacagctttacaattaacaaataatttaaacattgataatattgttttaatcatctcaatcgtcgcaattgcattaccaattatttacttctacaacatgctttcaagcaagaaaattactaaaaaagaacgttcacgcgttttagcttatattccactcttcatcgctgccgctgttttctggggtattgaagaatcaggttcagttgtcttggcattgtttgctgaagatcggacaatcttgcatattggtggctggaagcttgctgcttctaacttccaatcattaaatccattgttcatcatgcttttaacaccattatttgtttggttatggagcacatggaagaaacaaccatcagcacctggtaaattcgccgttggtttgatcttcgctggattatcatacatgtttatggcacttcctggattattacacgggacagctgttcgtgttagtccattctggttaatcggttcatggttaattgttgaaattgctgaaatgttaatctcaccaatcggcctttcgattacaaccaaattagcaccaaaagcatttagatcacaaatgatgagtatgtggttcttagctgatgctgctggtcaagcggtcaacgcacagttagttcgtttatactcaccacaaactgaaattaaatacttcttaggcatcgggatcgttagtgcgatcttcgggatcgtcttaattttcttcgtgaaaccaattcacaagttaatggaaggcgttgactaaattaattaaaagaaatcttggttatttatacaataatcgaggttttttttgcattttagggttgatttttgtctggaaattttgtaaactaatatagttgaatcgatgagatgagacagacatatggaggagtagcgaagtggctaaacgcggcggactgtaaatccgctccttcgggttcggtggttcgaatccactctcctccacttgattgggctatggccaagcggtaaggcaacaggttttgatcctgtcatgcgctggttcgaatccagctagcccaataatttatcaggtaagcggaccgacaattgtcggtccgctttttttgtgagtaaaaaaacacgctttattcatttatagaataagcgtgcgcggattattgatagcagttctgagttttaaggtaaaaaagatgatttaatcgcgcttcaggtaagccccagaactcgaatctgaagaggttaaaggaaatccgactaatagtccgtcgtgtgccttataaacttcacgggcccatgtatagccaagggagagtattaatttaaagagtggttttgagagaagataataggtaacaaaaaaggccgatgaattaattttcaccagcttttttgttatttatttcattcgtctaacaagtaataatagtaattcactgatttcgtttgcctcgtcagcatcaaatgttagtaattcgtcgataagtttttttagataaaaggacaataaaagccccctgcagtgaaatgggttcgttggctttttatagcatcactttgtctttttctaggcttgatgggtgttcaaaagtatcggcatgatcagttaacgcaaaatatcgcccgagcacgaaccgtcaaagtgcgaccagttcagacgaaaaagacggcggacgataatgcaccgcaaccaacttattgggatgaagatacgcgggggattacggttggtaagttggcaattccctcagttggcattaaattgccgattatcaaaggtattggtcaaacaaacgggcacgataatatgctaaaggcggctgttaccaataaacaaggacagacaatgggcaagcggaattatgttttgagtagtcacgatattgcccaggaaaatgttttgttttcaccactcggtcaaacgaaagtgggcgccgcgatttatttgaccgatacgaagcaggtttatacctatcgcgtcatcagtcgcaaaacggttaaggccaaccaagtagctattttggatgatgtccggcaaaaacgcctagtgactttgtatacctgtgatcctgatggcgagatagtcaatggtcagacttacgagcgaacagtcgttgtgggtgaattggttcaaacaacgaaggcatcagctaaaactttagcacgcttctaaatgaaacagcatctggcaaaattgattttgtcaggtgctgtttttagatagatatggtgttaattgactttaacactttctttcggtattcttggttcaatacaaaaaggggtggcagaatgaaaattggttttattggtgtcggtaatatggcacaagcaattattaaaggcttagtgaaagctgatcagatcgcaacaacggatattttggttcacggggctcatccggcaaattatgaagcatttgcggctgaacaacacattacaccagtggcagataacatcgcggtggtcgcacaagctgatattgtcttcttggcggttaaaccatatattgtgccacttattctagaagaaacaagcgctgcttttaaagaaaaacaaccattaatggtctcaatggcagccggtctttcattggctaaattaagtcaacaagtggacgcggataatctacctattttgcggattatgcccaacgttaacgttgctaaccgcgccggtatcacagccgttgtcggtaatgcacaagtgagtgctgatcaattgaagagcgtgaaggacgtcttgtcacaattaggtggcgttgttgaaattggtgaaaaagacttcacaactttcagcgcacttgctggtagttcaccagctttcgtttacttattcatcgattcaatggcacgggctggtgttaaacacggtttaaccaagaaagctgcaactgaaatcgcagcccaagctgttttagggagcgcccaaaatgttctgctgagtgacgattcaccatgggacttaatcgacaaagtatcatcaccaggtggcacaaccgttgcgggcttgttagcaatggaagaagcaggtttaatgtcagcagtcgtcaaaggtatcgacgcaacaatcgaaaaagacttggaaagccaaaaatagcgtgcggactcgaacgatttgactttgaggattaacctaaaaatgagcagtatggcaggttttagccatactgctcattttgtagttaaccggaaaaggcagttttgaaaagcacgtttaagcctaaaaaagaggtcaaataaaagtaatttttgtttcgacctctttttttatgccatgctctggcctatttttaacgacgttgcgcttgtctgcacatcgtatgacataactgatgtgttaataagctactggcaggtgagacggggttttcaccatttgtttgtaaggctgtgataaaggccttgatcattgggtcaaagccacgagtaactaatgttggttcccagtctgcaggttgttgttgccggttatcggttgccgtcttggcggtatattgtgtcaggttatccacggtgaacaagccgtgcggactttgaagactagcgatttcttggttagtgccgccttgcatatttaacgtcgcagtgatgagttggctggccgtttcaacggtcaattgggcgacttgtaattgttggttggcatcctgtttacaatacgtttgcacgttatagctcaaaccaacgtcattggctaaataaagggctgtattaatagtatgaatcattaaatcgtaaatcgcaaaagcggctggttgccgtgtatcaacgcgtgttttcgtaacgttaatcagttgcttgttagggatgctttttaatttttgtaattgcggcacaaaacgacggttgaaacccacggttaataataggccttgttgtgcggctaatttatagagttcagcgacttccagtgggttctcgctgagcggtttatcaacaaaaacgtgtaatccatgtgagagtgcttgcttaacaagtgtataatgggtattagtaggtgtatggataaaaacggcatccaatgattttgccaagagggcctcaaaagaaaggcaaccatcgctaaagtgatattgggcctgtaattgtgcaagcttagcaggctgacgagaacataaaacccagttaacttgatcttgtaattgtgccatcactggcaaataagctttttgcgcgatgttccctaaaccgataaccccaatatttagcatgcttaaaactcctcacagtagttgataaggacagtataccaaatttttaagaaaacggttcaaagatcacgccgagtggcttgcatttttggtctataccatttatactggaagtaatttaataatagaggtggatggataatgacaatcaaagttttaaaacatgcagtaatctatactggtgatgacgttattgaagacggctatattcgttttgacaaacagattttagctgttggcccaatgtttgactacaaagcacaagctggcgaagaaatccaagatatgaaaggtcaaactatcattcctggcttcatcgacgttcactgtcatggtggttacggtttcgatgcaatggatggcgatgctaaccaaatcgacgaaatggcaacgaagatgatgcaaaacgaaggtgtcacaactttatttgcaacaacaatgacgcaatcaaatgaaaatattgccaacgccatgcgtggtgttaaagacgctgctgaaaagaacccattaatccaaggtgtccatctagaaggcccatttatcaccccaatctttaagggtgcccaacctgaacaatttatcaaagatccagacgttgacttattagacgaatggaacaaattatcaggcaatcgcgttcgtttaattacttacgcaccagaagatcctggttcaaaagccttcgaagactattgtttagcacataacatcgtgccttctgttggtcatagtaatgccacacgggagcaaatgattgaaagtaaagcaactcacgtcacacatttatacaatgcccaacgtgaattcaagcaccgcgaacctggtgtaacaggtcacgcaatgttagaagacaatatgtatgctgaattgatcgcagacggtttccatatcgtgccagatatgattaaattagcatatgaacaaaaaggtgcagaacgtatcgatttagtaaccgactcaatgcgtgccaaagggattgctgaaggcgaaagtgaattaggcggtcaaaaagtaatcgttaaagacaaacaagcacgtttagaagacggcacattggctggttctgtcttgacttacatcgatgccttcaagaatatccaaaccttcacgggctgtgataaatttgaagccgttatgatgtcaagtgttaaccaagctgaagaattcggcctaacacaaaaaggtaaattagaagttggccgcgatgctgatttaaacgtcttggaccaacaacaaaacttagtggcaacttacagcttcggccaaggttaccaacattaatcaataggagtgtgacccatggaatcacctgtttatattcaaattcataatcaacttaaaaaagatattgaagccggcaagtggtcgattggggatcggatcccttcagaacgtgaactcgcattaaactttgaagtctcgcggatgacgcttagacaagccgtccagacactggttgatgaaggcattttggaacgccgaattggtgctgggacttacgtcgctaaccgaaaagtccaagaaaaaatgtccggggtaaccagttttacagatttaatgacggcccaaggtaaaacgccatctagcaagacgatttcttttcacattgctaatccatctctaagtgaggctgaaaagctccaactaaaagacggtgaacaagtgttgcggatggaacggattcgttacgcggataatattcccatttgttttgaagtggccacagtgccacaatcattagtcgctgatttcagtaaagctgaaatcactagttctttttataagacgctggaagaaaaaggcggctaccaaatgggcggcgcacaacaaaccgtttcggcgcaactcgcctcagaacgaattgccgaatacttggacatcaagcgcaacggctcaatcttacgcttgcgccaagtatccttcttaaacgacggcacaccatttgaatacgtccgcacacaatatgtcggcgaacgatttgaattttatttggaaagataatttaatcgtataaaaagagacctcccaaaatatatttttgggaggtctctttttatacatgtaatgacttaaagagtaactaattaatgttatcaatatttgtggcgaatacacatataaatatacacctttaaatatgatgttagtagtcttgttttaaattagtatcagtgtagcatagttgttgtaaacaaggaggagatacaaatgaaggggaaaaaacttttagtatcactcgcaactttactgctaacaacaggagctgtgatgccggtttttagtaatatcactagtgctaaggctgattcgatagaaaggaaagccaaggtaccattagttaaaaatagtagtttaggacagggcttttatactactaagcagaagttacaactgccaaatacaatggcaagaacagatacaactactttctttaataccattaagcaaggtgcaatagatacttggggaaagcataattttttaccctcagtaacggctgcacaagctgctatagaaagtggctggggcacctcagatttaacagcaaaagcaaataatttatttggtattaagggacgctataatggacagtatgttatttaccctactcaggaatgggtgaatggacattatgttactatcaatgcagagtttagaaagtatccaaattgggctactagtgtagaagaccacgggaatttctttacagataatgaacgctaccataacctactgggattaaaggactataaacaggttgcaaaattagttcaagaggatggttacgcaacagatcctaactatgcagctacaattattaaagttatcgaacaatatggtctacaagaatgggatcaagaagcgtttaataatactggatttccaaagactccagtaagtgaagcaacagcaaaaatcacggctaatagtacttatggttatcatgccaatggtcaagtaattgccgggtcaaatgcaacttttaaaaaaggaacaagttggaaagttggcaattttaaaatggtcaacaatcaagaaatgttattagttgcagcggatgaatatattccgcgtaaggatacatctattgataatagtatattagaagttaattactaccctaatatgacggttaacacgtataagttagatggtacgttagcgcctaacaaattgaagacaggtacaaaatggaaaaatagtggttttgtaatgattaaaggacaagtaatgtatcgtataggtcaagatgtttatttgccaaaattatatacgcaatttggggcaagcgggcctaaaccagcaatgagtgaagccactgcaaaaattactgtagatagtacttatgggtaccatggtaatggtcaagtgattgctggaacgaatgcaacttttaaaaaggggacaaattggaaagtcggtaattttaaaatgattaataatcaagagatgcttctagtcgctaccgatgaatacattcctcgaaaagatacatcaattgataatcgtattttggaagtcaattatattccaggtttatcagtttcaacatataagctagatggtacattagcacctaataagttgaaaacgggcactaaatggaaaaatagtggattcgtaacaattaaaggacaaacaatgtatttcataggtcaggatgtttatttacctaaacaatttacacaatttggacatgttgatttttagaaagttaaaataaacgacacaaccaactggttttggtgtcgtttattttttatttttagggttaaaaaatctcgttaaatgctatagatttacattcataagaactgtaatatgaattatgaagtactttttgtaaataagggatataggagacggctatgacagctaataaaaaacgactaacattacttttaacacttcttctttttatggtttcaagtgttttaattctagtaccatcacaaataatgaatcatcacatttggacttatctcgggactagcgataatcgatttcatatgatgagaatcgaaggattagctgacgctttaaaaaatggtaatctattccctaagataaatatgagttttattgatgggttcggatacgttgcgaatttattttattctaattttatgttgtatccagcagctattttaaggttatgtggattgtcaatgagtaaagttacggttatttatttttttatacttaatttcttaacttttatcagtgcattttggtcttttaaaatgattaagggatcgtattggaatagtttgatttttagttttatgtatacttcatcagcctatagattacataatttactatttagatatgatttgggtgaattgggcgcttttatattcttaccaattgcatttgtcggtatttatagtattttttacggtgataaaaagcaatggttagcattagctctaggaattacgggcattatttattgtcacccgttatcaccattattagtggcatttcttattttatgttgtattgttctaaatttgaaagaaatgcgtgcagatttacaaatatttctttcgttagttaaagcgacaggtgtatcaatattacttagcttggcttattttctaccaatgctagaacaaatgaaaaatatgacgtttaaactttcagatgccaaacctaatttagagttaaacgctagtaagccaatgtcgttaatgacagacagtgttaacaataatattagtcaaccaacactaggtttagttgtgattttagcgctaatcgttatgtggatgaactataagcatatacaacagaaaagtacacgacaattactagtgctgggttcatcgttgctttttatatcaacaaacctatttccgtggattattatacaaaagacatttttaaagatgttacaatttccttggcgattagatatgatagtaacgttactcctttgctttgtatttgcagaaaatgcaggatacttttttaatacaaatttaaaacgatatttattacttgtggttatattgatgataggtgtctcatcaggaagaaatttagttaaaatgtaccctaataatagtgttagttatgcaaaatacaatacattggatacttatagtattggtgcggggcaagaatatctacctttggcctctaacttggagagtttcagaacaatatcccataagccaagagtcgtggccgggaggtcgaagttgtcgttttataaaaagcaaggaaatacaattactttaaggtttaaaggtgccaaaaaagctaaagtggtattaccgttaatatattacaagggatacacggggactatagatgatcaagaaatggtaaaagtattcgccggtaaagaatataacggtcttgtaaccgttaatatatcgggaacgggaacattaaaggtgaggtatcaagaaaccttaatgcaacgagttggtgcacttctatcaattagtaccctatttatcataatcggatttagaatatttaaaaagactatatgattattggttaatgctatttaacttcacctaaaattgtggtaaatttttaagagtaatgaattattagggggataaaaatggaaaaacggttaacaggattcttgctaggattaacagcaatgtcggctctatcagcagtgaatattaataatacttatgctgctcaagtattagcaccaaaccagatgaaggcgcaactgactagtcaagatattaaagaagctacgcctagaaaagaaaaagcaaaagggacggatgatattggggaagttatcaccaatcctgatgctactaaaaaaaatagtgcaattagtgcattttcagcttatcctaatgtaaatagttatattttaaataagaatttccaacatcctgaaatcactaaagaattacacacattcgaaatgtttccatacaaaacggatgacggtaaaccttctggtgttgtagtgcattatacggccaaccccaatgattttagcgcccgaaatggggcaaattatgaaattaatggtggttgggaaagcgcatttgtacacacttttatcgacgctgatatgattttaaatattcacgatacagactatggtgcatggggtgcaggccctgtcgctaataaatatttcacacaatttgaaatggtaacggctagaaacttcaatgattttgctaagactacaagttattctgcttggtacacagcatttttacttcaacaatatggtttaacgccttcattagcccatgatgacggggttgggactatctggacacaccacgatgtaacaaatttcttgggtgggacagatcatgttgatccagatgattattttgcgcaatatggttatgatattaatcaattctatagtttagtacagcattattatcaacaaatgactgaaaaagttgtgaatagacaatatattgataagaccggatctgttgttggaaataaggcagaatattggttaacagataatggattgaaaccggctaatcaaacaactgataatttagttaataaggctgttaaagtgacgcagctaattacaatgacaagtggaaaacaatattacttagcaactgttaatggtaatcaggtagcttggattccagtagattcttttaaggtaagcgagatggtaactaaccgtcagtatgttgataaaacagggaccattacaggtggacaaccagaatattggttgacagatagtggtattaaatctgctaatcaaacaactggtaacctggccggtaagactgttaaagtgacgcagctaattacaacaacggcgggaaaacaatattatttggcaacagttaacggaaaacaaattgcatgggttccgatgagtgctttcaaacagggagaaacagttgttagtcgtcaatatgttaataaaactgggatggtagtaaacaatcaaccggaatattggctgacggatagtggtattaaatctgctaatcagacaacaagtaatttaacaaataagtcggttaaagtaactcaactaattacaacaacttcaggtaaacaatactacttagcaacggttaacggaaaacaaattgcatggattccggcaactgcctttaaccagggagaaacagtagttaaccgtcaatatattaataaattagggactgttatttctggtcaaccagaatattggttgacagatggtggtattaagtcagctaaccaaacgacaagtaacttagctagtaaatcagttaaagtaacacaattgattacaactacaacaggtaaacagtattatttagcaactgttaagggcaaacaggtagcctggattccggtagcggcgtttaagcaaggagaaacggttgttaaccgccaatatgttaataaattaggtagggctatcgcgggtcaaccagaatattggttgacagatgatggtatcaagtcagctaaccaaacgacaagcaacttagctaataaatcagttaaagtaacacaattgattacaaccacaacaggtaaacagtattatttagcaactgttaatggtaagcaagtggcatggattttagttacggcttttaaatagtaaatattaagatggggattatactcgagagagtatagccctatttttttgccaaaaataaaaacaaacttaataaaatgacgtatttagttaaacttcctggcaaaacttggtttttactatagaattatgtagaatagcaaggtagatgtaataaaaaaggcgacttactaagtctatttggtattcgttttattatttgaaaggacgtttttaaatgacagttcagagaaatagaacgataaaaaaatacggtttattttttttgatttttctgttttttgggtacctatccattaatttcccattaacaggagatgatttaaactggggtgtaacgactctaagagattattttggatcaggacgattcttaaattatgatgggcgctatgcggggaatagtttaattatcatagctagccatagcgcaatttttaaagttttaagttatgcgggtattacaacattggttgtttatctagcggcacatttaatcgataacgtcagacagttagaaaaaaatacgttattaattcttgctttattgttaacgatgagtacggaattatttgcacaagtcttgggttggaatgcggggttctttaactacatggcagctctgatttatcctttacttattgttaatttagtgaagtaccattatgccgattggcaagcgttaaaatatttacaatatagcattttgatagtgattctttcaatcattagttgtttctttgttgaacacgttacactattgaatttagcagttgctacaattttaatgggatatatgctatatcaaaaaaagaaaaattacctagtgattgctaacttcattggcacgtacattggtggcgctttaatgttctccaataaggcttacttgaatattttattccatcatgataggtatagttatcgagaaactagtttttcactctctaagatttaccatattattgcacaacaaatggatttttatctcttaattaataatccaattattacagtgttactggcagttattttggggtacttaatcatcaaaaatcttcaaaagcattcagctaatcgattaggcacggtagtttcttatctagagttgagtgccttgattgcttttacagaatatcattatattttgtttaatactttttttaagaattttagtcatcgctatttggtatcatgtctattatcaatcttattcttactcgtcattgtgattgaaatggccaagttatccgttgaaacccacaatattgaatatattgcattgattatggcagccgttgtattagtcatgccgttctttgttgtaacaccattcggacctcggggggcatttgcaagttatttttgcctatgcttgttagtagtagcgttgtgtaatcagttgaacgttgttaaatttagtttacctattatcagaatagtgatggtaatgattgtcattttttatgcaggcttagcaacacgaattggtcatgcaagtcgtatcaaaaatgattttatgatctatcaggaaaaacataacacgcctaaagattatcgtttatatctagaggtaccgtataatcagtattattgggcagttcatcctcaagccggtgatgctagttatagaagatactataggataaagagcgaaggagcaaagttagtcccatatgctaagtggcgcttaattgaaaagaatacgaatagtaacgcagaaatgttttctcaagttttaaaagttgatagtcaaaataaataggcgggataaaatgaatttaaaaaagagattgaattatgtgacgaccctactttctccaagctttattaacttctacttaaagaataagcaaacgccggttgcagatgccttaacgtatgttaagttaaaaaaagaagccggagcatttcttgatcaatatcaagtacaaccgacaagcagcgaaaaaaataacgtcatttggatttgttggttccaaggcattgaagatgcgccagcattggttagacataatatcgaaacgattaaaagactatatccaaaacaacaggtgcaaatcataacgttagcaaatttaagcgactttattacctttccaacattcctgcaggctaaaattgatgcagggctaattccttatgcgcacctatccgatctagtacgggtggcgctgttaacgaaacatggtggcacttggattgatagtacagtttattttacggggactaatttcccgggttatgtttttgatgcaccactctttttctacagcaatacacaacaacaaaatcgggcaattgctgcttcgagttggttcattcatagtgacactaaccaccctatcttagtattaacgcgagatttattatataattattggcagacacatgatacgttagataattattttatgtttcatgtctttttaacaattgcttgtgatcacttaactgcggaatacgcaaagttaccacggttgagtaacgttgaaccgcaccttatggggaaggtgttattcgaaccgtttgatgagcaacgctatcaagaaatagcaaccttatcaagcatgcataaattaacgaacaagttttcaaaagagaatcaagaaaaaactgatacgttctatcaatatatattgaatcattaatcttggaggaataagtccgtgaactttaaagaatatacaaaaaaatcactaattttattagtgttactgcaaccatttttggatatctattttttatacgtaccaccagttacaaattgggtaccattttcaccagcaaccttgattagaatttttctcgtagcgattattgcggggctttatatttggagtagccgtcataataaggcgaatcgatttgcggggctttatacggctattctagttgtttatttagtcttacatctgatatttacacgacattttaaatcaaccagcccaatcgacttgggttactcaacggtgggggaaatcttctactggattagaatggtaatcccattagttgtcttatttgtgacaacacaggttcaggtaactagagctacgtttaataaagtgattaagttcttagcctggattatttctggcagtattgtgattacgaacttattcaaaattagcttatcatcgtatggtggtggctggattcaaggaaatattttttcatggtttggtggcggccaacaatggtcttattacggcttagcgtcaaaaggctttttctattacgctaacgcagtttcggcagtcgaagtattattgacaccgatggttctttattatttggttgaaaaactagatttaaagagtatcgcactagcaacagttcaaatgtttgcaatgttaatgctcgggacgaagaccgcatcattagggttcttcgttgtattggccggttatatcatcttatatttgatttacagcttgctatttaaagaatttaagttcaaggttagtttatttgcaacatttgcagtcctaacgttggtcggtggtgctattttaccgatgtcaccaatgtttaatcggacaacgaccgatacagcggttcaaaagacacaagatggtactaagaaagaacaaaaagaaaagaaaaaagaattagaagctgaaaaagaaaaagagcaagaacaatctggcgatcaaattgaccatcgtaaagaaacgcctttgatgagatatatcaaaaatcattatcgtgattactcattaaatgcgagatttgtgatgggtggctactcatatcgtgatgatccacaattctggtatcaagtaatgaaatggccagttggtgatcgcttaaattaccgcaaggtcgaagaagcaatgctaaatcgtgctaaatccgttaataacgacccattaaataattggttcgggatttcttatactcggatgaaccacattgccaatttagagcaagactttatctcacaatggtattcaatgggcttcatcggcgtcttactattaatcatgccttacgtctttgtactgctatattgtttatacgaagtaattcgtgtgctaggtaaaaaggcaactttctttgaagtgagtttattatttggctcaggattaatcattgtgctatccgcattcagtggtaatgtaatggatttcttagcggatacgattattctagcctttgcattaggatacgcattagtgacaacgagaggacttaaaaagcatgacggctatcgcaacagttaaagcagttttatatcatcgtatttggtttggtttgattaaattagtcacaccaatgtcagacgacacattttttatcaattctttttttggaaaatcattctcaggtaatccaaaagccctctttgaaggtttgattgagaaattccctaacggtaactatattattgttttaaatgatgaacaagcgcgacaagcagttaaggcccaatatccgggtattaatatccaatttgttgccagacacgagaaggcctatttaaaggcgcttgcgcgtgctaaatattggattatggatattaactttccattccgtctaaaaccccataaaaatggggtttttgtgcaaacttggcatggtacgccgcttaagcacattggcaatgatttaccagatgataatgacttcaaacgcttgacggcaagagaaccccttaactgggactactttgtttctaatgcacctgaagataattggttgtatgaacgagcatttaatttaaagcaaaccaagattatgagctatgggttaccacggaatgattatttagcgaagcataaagatgatcatgaattggtagctagtttgaaagcaaaactacaattagatgcaacacgcaaaactattttatatgcacctacttttcgagatgatgaacctacgtttaaattagcgttagatttagagcaatttgaagcacaattgggtaatcaatatgacttgttaattcgcttgcatccaaacgtggcggaacaaatgccagacattgcggcttatccacatgtgcataatgtcaatcactacgcaagtatcgaagagttgtatctagcagccgatgttttaatgactgattattcatctgttttctttgattatgcgttattggaaaaaccgattgttttttacgcatatgatttggataaatatcaggctattttacggggcttttattttgactaccaagcctttatcccagggccattagtaacagataatcaagacctgtatacattgcttagtcaagggttaacgacacaaacgacaaaagcatttaatcagttacacaatgcgaacaccgatggttcggcgacgcaaaaaataattcaggaagtttggaaagtttagtatgaaaaaagcctcaacaaatatcatttataatgctgtttatcagttgctgatcattgtactaccttttgttacaacaccatacgtggcgcgggtattaggcaaagaagcgttaggcattaattcctacgttaactcgattccagttttcttgagctttatcattctgatgggaatgaaccaggtgggtgtccgagtaattgcccaatcgacaaaagaaaatcttgaagaaaatttcaaaaaactatggggtctgcaactttttagtggtttaatcgtgattattagttatattgtggttgtctgcttattcatgagttataaattctattttctaattgaaattccgtttttaatcggctatgttttggatatttcttggttttacattggtcgtggtcaagttaaaacagtggtcatgcgaaatacaattatcaaattaacattagtggctacgatttttatttttgtacacagtgaacaagatctttggatttatttattaatcaatagtattacttatttagctaattttgtcttctggttagggattaaaacagaaattccccaatttaaatttggacgaattcatttttctaagcaatatttgaaagaatcaattaccgtcaccattccttcagttgctgcgcaattttatacgagctttgaccaaaccattattggcttattagcgggttctgttcaattaacgtattatgctcagacgcaaaccatggcgcgggcagttgtacagttgttgggatcagtgacaattgttttaatgccaattatggctaagatggacagcgaagaagcagatgaaaatcaaattcagaatttattgaaagtctcgttggactatactttgatactcggcttgctattcacgagtgcgttgatggtcaatgctaacaaatttatcgtttggtttttcggtagtcgctatcaagcaatgacggataatttcttttgggttagtttacttgtggtgatcattccttatggtggtatttatgccaatcaatttgcgctatcaaaagggatgtaccgaattgtcgcgattccatacttagttggcgcggtcttctccctaattgggaatttcgtattcgccggtcgctttggggctaatggtgggacaaccattattgtcctgaccgaattattggtttgtgggatgcggatttggttagtacgagggcacttagattttaaattcctgtggcatgaacattggaagtactggctaatatttggcttaacgttattaattggcttgcatattccaatcaacctcggtagtttattctttgatctcgtcgttcaaacgattatcgttggccttttattcatgatattattaattggattaaacacacgtgtccggcaagatttgatgcgccttaagaaaggatgatttaaaatgacaaaagttttaacttacggtacctttgatctattacactggggtcatgttcatctcttagaacgtgccagccaattaggcgatgaattaattgtcggcttatcaacggacgaatttaatgctgaaaagcataaagaagcttaccattcatatgaacatcgcaaatatattctcgaagccattcgatatgttgataaggtaattcctgaaaaagattgggaacaaaaaattaaagatgttcaaaaatacgatattgatatttttgtaatgggcgatgattggaaagggaagtttgatttcttaaaggattattgtgaagtcatctatcttccgcggacaacaggtatttcaacgacacaaattaagcaagatttagaaaactaaattagaatgaaaaggtgattacgtgaaggttctttttgtaaacgcagggaatgaaacgggcggtggtcgctcacatattatcggtttaatgaaggcaatgatcgcacttggtaaagacgagccttctttattagtttttgaagatggcccggttgcagaactagcgcgcgctaatcaattaccggttgaagtgtttgaacagccaaagacgttaaccccgcattttttgaaacaactagcagcgcatatcaattctgaaaatattgatgtcgtgcatacgcatggaccacggtctaatctcttcttggcgttaattcggaaacgaattacggcgaagtggacgttgacattgcacacgttacctaagattgattatctgaataaagggtttaaaggcaagattttattgccgttaagtctctgggtacttaaaaaagcggatcatatctatctaatcgccgaacggtttagaaacagcttggtgcaacaaggtatcgatacgaataagatgacaaccatttttaatgccattgaatttagttcagaagtaccgacgccagttaagcaaccgcaatttacaatgatttgtgtcgccagactaacagcgcaaaaacaccaacagctattgttagaagcgttagcaaatgttgatttcgaatatcaactacacctgattggcgatggcgaactagaagcagagtttaagaagttagcaacagattatcaaataactgataaggttcattttgatggctttcaatcagatgtggcgcacttttatcgacacgccgatttatcagttttatcgtcaattcacgaagggttcccaaccgtcttgttagaatctggcaattatggcgtccctgcgattacgaccgatgttggtgatagcaaggtaattatggatagcccagaatatggctgggttgtggatagcttagacttacaaggatatgtcaaagcgttaaatgaagcttacgctgcttatcaaaataaccaattagttggcatgggcttagcctttaataagcatgttagtcaatcattttcaacacgccagttagcgattttgatgcatgatttgtatgcacaattgtaggcgtcaacaaggagattactatggaaacaccgttaattagtattgtgatggccgtttataatgaaaaagaaacggaattacgccagtcaattgaatcaattctgaaacagtcttatcaaaattttgagttcatcattgttttggataatcctgataatcaagcattggcagctgttttaaatgaatatgcaaaagaagaaccgcgaattgttttaatcagcaacgagcataatctagggttagcacctagtttgaatcggggattgaaagcaagtcggggtgattacattgcgcgaatggatgctgatgatattgctgtgccagaacggctaatgactgaatttgatttattgcaacaacggcaattggatgttattgcatcatcttcgattctgattgatgaaactaatgccgagattggtcggcatccacaaatggttgaatcagcagctgccgttcgtgagttattacaatatgataatttcattgttcatccgagtgttctgggtaaaaaagcagcttttgaaacagttggtggctatcaggaacaactaatcgcctgtgaagattatgatttgtggttacgaatgatcgcggcgggtcagcaaataggtgtgactaatgaaccgttgatgcgttatcggattagacaaaacagtatgactcaaagtgacatgttaaaaacctttctaatttctggctttttacgtcagacgactgtgtttagattaacagcgagtgatgaagcaatcaaagcgaaactggaagcttacctaactgaaaaagggttttacgatcaacatcaaaaagaccgctttaacgctaatattaatttattgagcactgttaaaaaaacgaaatcaattggtaagggactccagtttctgggcatcttgctgagtgacggtaatgtgagacggtactatttagaaaaaattcagtacagccgaacattaaaacgattatcaaaataaaaaagcattgaaggcaaaattaagtttgtcttcaatgctttttttagtttttcttttcttttttaaccaagcgcatgtattcaataagcgctgggaaacggttcaagcgacttggatgtgatgcaaaacgatagaaccattctaagtgcattttttgccaaatttttggagcccggctaacagttcccgataaaacatcaaagctaccgccaacacccatccaaatggcgttaactttgtgacgattggcttcgataaaggtttcttgtttggggaagccaagtgctgccaaaataatattgggttgtgttcgttcgatatcggcaacaattttttgttcttcttggtcgtcaaaataaccgttgtgttggccgacgatggtgacgttaggatattgttttgcaacgttttggcaagcggcttgtaaaacttcttccttagcaccaagcaaataaacgctatagctgttttgattggcaatttcgaataaggccgtcatcgtatcaaaaccggtaattcgttctgtaagcggcgtgcctaacattgtggcgcctttaagaataccaataccgtctggtgtaatgtaatcggcttggctaatcgtttggaagtaatcgttatgtttagtggcatagagggcaatttctggattagcagtaacgataaaacggttttcgttagcggctaagtcttttgaaagttgcgcaataaatgcttggttagtagtattgataaaaggaatatttaaaactgagactgtcggaaattgcatttgtaaaactccttctcgaaattatgcagaactcgctgttttattgtataatagcttcaactaagtataccaaatatatctctaattaggagtgcgacatgcaaaaattatatcctgatgatagtttgttgttacatacagacttgtatcagctcaatatgatgttaacttattttaaaaagggactccataatcggacagcggttttcgaatgctatttcagaaaactaccttttgaaaatgggtatgctatttttgctggcttggaacatatcgttaattatcttgagaatctccgctttaccgagagcgatttagcttatttacgggatgaagttggttatcctgaagattttttgacgtatctagcagaattagattttgatttaacggttcgttcagcggttgaaggcgaattggtctttggcaatgaaccaatcatgcaagtagaagggccactcgcccaatgccaattgattgaaacggcgttattaaatattgtcaattaccaaaccttgatcgcaaccaaagcagcacggatcaaatcagtggtcggcaaggatcccgtcttagaattcgggacacgccgggcccaagaaatggatgctgctttatggggcacacgcgctgcttatattggtggctttgatgcaaccagtaatgtacgagcttctaaaattttcgggattccagcaagcggaacacatgcgcattctttagttcaagcttaccgtaacgattacgaagccttccgggcctatgctgaaacgcatcgggactgtgtcttccttgtggatacttatgatactttgaagagtggtgtgccgagtgcaatccgagttgcgcgcgaattcggtagccggattaatttccaaggtgtgcggattgatagtggcgatatggcctatatttccaaacgtgtgcgccaacaattggatgaagcaggcttcacggacgctaaaatttacgcttctaacgatttagatgaaaagacaatccaaaacttgaagatgcaagaagctaaaatcgatgtttggggcgttgggacgaagttaattaccgcttacgaccaaccagccttgggcgcggtttataagttggtttcaattgaaaactcagatggtaagatggtcgataccattaaattatcaagtaatgctgaaaaagtctcaacaccaggccgcaagcaagtttggcgaattaccaaacaagttgacggtaaatcagaaggggactacatcacattatgggatgaagatccacttgaacaagatacgatttacatgttccatcctaattacacatacatcaataagaccgtgaccgacttcaatgcccgaccaatcttacggactatttttgaaaacggcaaacgggtctatacgttgcctgaattagcggcaattaagaagttctgtgctgaaaaccttgattcactttgggatgaatacaaacgtgacttgaatccacaggattacccagtcgatctatcacaacggacttgggacaataagatgaattcaatccgcaaagtcagagaagacgttaatttaatgcactagaatcgattatttttgaaggagtatctggcaaatgaacgctttacaagcagaaattattgcagccttaaaaacacaaccaacgatcgatcccgccaaagagattcgccgatcggttgattttatgaaggcttatctaaagaaaaatacatttttaaaaagctatgtcttaggcatttcaggcggccaagattcaactttagtgggtgcacttgctgaaaaagcaatgcaagaaatgcgggccgaaactggcgatgaaagttatcaatttatcgcagtgcgattgccttacggcgaacaagctgatgaatcggatgcaatggccgcgattgaatttatggcagctgatcaagtcaaacgggtcaacattaaaggctcagtggatgcaatggtccaatcccttgtggaaaccggtgtaaccgttagcgattttaataagggtaatattaaagcccgcgtgcggatgattgcccaatatgggatcgctggtgaaaatagtggcgctgttttaggaacggatcactcagccgaatccatcactggtttttatacgaagtttggtgatggtggcgcagatttagtgccaatcttcagactcaataagcgtcaaggcaaggccatgttagccgaactcggtgcgcctaaacacctctatgaaaaagtaccaacagcggatcttgaagaagaccgtccagcattaccagatgaattagcattgggcgtcacatatgatcaaattgacgactatttagaaggtcgtcaggtcagtgaagaagccgcaacgaagattgaaaactggtacaagaaaacggcccacaagcgtcatctaccaataacaatctacgacacattctggcaataaaacagagtgcgtttcaggcggatatattgtggcgacttagcctaggctcgtgaataagcgacgcagtcgattgtttgcgagacgtagctaactgcaacaatatgcctgaaaaagcacgtttcagaacaaagtgcgttgtcagtggttagcttttgagcatttgcagaacttagcgaattggtgatgaaatcaccggtttgataagtttagcaaagcacagaaagctactgacaaaagcacgtttataaccagagtgtaccgtaaccctggttatatccttagggttaaccggaaggatatgggttacagaacgcgtttagccctgcgttgtcagtggttagctttcgagtctagtttcgtgagccaatttagttattaaaataattatttacttgccttttagattggttataccttataatggggttaacgataagggagtaactggcagcttgtctgcgataacgccaccaacaaggcaatattctggtgttatcttaattagtgagacttatagggatttttagaattcctgtaggtctctttttttacccccaaaatcaaatttataggaggcaaggtaatggtagataaacaaaccacattttttacacaatcaacagacgcaacacttaaagcgctcgcaacaacgccacaaggtttaacccaagaacaggttgaaaaacgtttggcagaaaatggtcggaatcaattaactgaaaagaaacgcaaaagtttagcgattcgtttcttagaacagttcaaagattttatgattattgtgttattagtcgcagcaatgatcgcgggctttttagcacatgaatggccagacgcattcattattctagccgttgtgatcttaaatgcgatttttggggttttccaagaagcaaaggcggaacaagcaattgacgccttaaaagaaatggcgacacctgatgcacacgttcgtcgagatggcgaaatcgtgacgattaagagtgaagaactcgtagttggcgatatcgtgttgctggaagccggcgatattgtgcccgcggatcttcgcctacttgaatcagctgctctgaaaatcgaagagtccgctttaactggggaatccgtaccggttgataagacagttgagacactaactgatccagaaagtgggattggtgatcggaccaatatggcgtttatgaatagtaacgttacttacggtcgtggcgttggtgttgtaacggggactgggatgcagaccgaagttggtaaaattgctgggatgctcaaccaagccgacgaaacaacgacgccattacagatgaacttgagccaattaggtaagagtttgacgattatgatcttaattattgctgcaattgttttcgtggtgggttacttacgccacgcacaatcaccaattaacatgttattaactgctatttcgttagcggtcgcagcaattccggaaggtttacccgcaattgtgacgattatcctcgcattagggacgcaaaagatggttaaaagaaaggccatcgttcgtaagttacccgctgtagaaacactggggagcactgatattattgcgtctgataaaactgggacgttaacgatgaaccaaatgaccgtcgaaaaaatattcactaacaatcaattacaagatgctggggcaacactgccagcggataatttgacgcttaaaatcatgaacttggccaatgatactagaattaaggccgatggtgacatgattggtgatccgactgaaaccgcgctgatcgcgtatgggcgtgataaagattttgatattaacgcagccttagcagccgaaccacgggtcgctgaagtaccatttgattcagagcggaagttgatgaccacaattcatcaacaagctgatggtcaattcttaatgaccacgaaaggtgcaccggatgaattgctcaaacgcgttacgcattatatcgacgcacaaggcgttgttcaaccgatggacgatgcagagcgccaattattattagacacgaaccatggtttggcaaaacaagccttgcgagtcttagcgttggcttataaagtcttaccaagtgtgccagcaacggttgatccaacgattgaaactgatttaattttcgctggcttagttgggatgattgatcctgaacgaccagaagcaaaacaagctgtaacagatgcgcattcagctggcatccggaccctaatgattactggggatcaccgcgatacagccgaagcaatcgcgcttcgtttagggattattaccccagaagaagatgcggatgccgccgttattactggtgctgagttagaccaaatggatgatcaagaattcgctaaaaaagttactcaatacgccgtttatgcgcgggttgcgcctgaacataaggtgcgaattgtgaaagcttggcaaaaacacggtaaggttgttgcgatgactggtgatggtgtcaatgatgcaccagccctcaaatcagccgatatcggtattgggatggggatcaccgggactgaagtttctaaaggggccagtgatatggtcttagccgatgataacttctcaacaatcgtaattgcggttaaagaaggccggaaagtctttgctaatatccaaaaatcaattcaatatcttttatcagccaacttgggtgaagtgttaaccttattcatgatgacagtattaggttggcaaattctgcaaccagtgcatatcttgtggattaatttagtaacggatactttcccagcgattgcattgggggttgaaccaactgaaccagggattatgaatcaaaaaccacgtgggcgtaaatcaaacttcttctcaggcggcgtgttccaagcgattatctatcaaggcctattagaaggtgggattaccttagccgtttacgcgttagcgattacgttcccagtgcatcaagcaagtggcttagcccatgcggatgccttaacaatggcgtatgcaacgttagggatgatccaactcttccacgcattcaacgttaaatcagtccatcaatcaatctttacagttggcttctttaagaataaagccttcaactgggctgttttagcttcatttatcttattagccgcaacaatcatgattccagggctcaatggcttattccatgtctcacaccttgatttatatcaatgggggattgtattagcagcttcattcatgctagtagtcatcgttgaaatcgtgaagttcttccaaagaagagctgctaaataatttaataaaagaccgtgataggctgatgcttaaaaagaaatagaatgaataaggtactaacgacaaaagttattcttgtccttggtgccttatttaattgttacctgattgaaacgtgctttttgaaactgtcttctgtgcttagcgacgtattgcaaataaccgattatatcggttattcacaacacgatgctaatgctcgaagtcaaatgcgtttcaaacgcactcttgcaagccgataccagaattagtatactgaagcataggaaactaggaggattaacatgaataaaacacaacaaaagttggctaaatacggccaagctgttaacgatttaatcgacaacactgaaaaagtgcaagaaggcatgagtaaatatttcgtccctttaaaagcggccgttgctgatggtaagttagctgaaatgagcgaacaagattaccaaaagacagcccaaatcttcagagacggtgtggatcaataccacgaattcttagcacaatttaagacagccgttgccccagctcgtttaatgggtaacaaccaacgtttaatcggtgcttatactgatttcgttcaaggttgcgaagatttaattacaagcatgcatgatgatcaaacagttgatatgcaagcttttgctgcttcagaaatgaaccaagacaaagcaacagaacgaatttctaagtatatccaaaacatctcaaaaattgcttagatcaactcatgacagttcccaagacgggtgctgtttttttattgaagataaaggtagggacgcacatgactgatattcaacaacttgtcaccaaacaactgacgcaatatcgaccacaacaaattaatgccgtgttaaccttattagacgaaggtaacaccgtaccgtttgtggcgcggtatcgtaaggaacgaacgggtagtttagacgaagttcaaattcgcgaaatcgaacacaccttccaatacttaacaacgcttgaaaaacggaagaccgatattatcaagaatattgccgaacaagctaagttaacgccggctttacaaaagcaaatcgaagccgctagccaattacaagtgcttgaggatttatacctgccttataagcaaaaacggcggacaaaggcgacgattgctaaagaagctgggttagaaccgtttgccaacctgattgcgcaattaccgaacttttcagaacaagtcctcctggaaaaagcggccgattatcttaacccagaccaaaagattaccgatacagatgctgttttagcgggtgtacacgaaattatcgctgaaaatattagtgaaacagctactttccgagactggacacgacaatatacccgtcaaaacgggcaaattgtaagtcaggtgaaagatgctgatagcgatgataagcaagtttatcaaatctattatgatttctcagcaccgattaataagattgcggaacatcaatatttagcgattaatcgtggcgaacacgaaggtatcttgaaggtgaagctagaagttgccgaaaatatgattgttggtcatattgctcaagccgttattcacggtcaagactcagctgccgcccaaattattaaggtagctattgaagatgcctataaacggttcattggcccggccattgaacgtgaattgcggaagcagttaaaagaaaaggctgatcaacaagcgattgcggtctttggcgataatttaaagcatcttttattacaaccgcctttgaaaggcaaagttgttttaggctttgaccccgcttaccgaacaggctgtaaattagccgttgtcgatgggactgggaaatttctagataaattagtaatctatccgcataaaccagctgcagcgcctaaacgaacagcagctgccgatgaatttaagcaatttcttgagaagtatgatgtcgaaatgattgcaattggtaatgggaccgctagtcgtgaatctgaagaatttgtagcttcagttttaaaaaccatttcccgggaaatcttttacgtgattgtcaacgaagcaggggcctccgtttattcagcaagtgatacagcgcgggctgaatttccagatctacacgttgaagagcggagtgcgattagtatcgcacggcgcttacaagatcccttagcagaattgattaagattgatccacaagcagtcggtgtcgggcaataccaacacgatgttgcccaaaaggaattgacgacgcaattagacacagttattgaagatgttgtcaatagcgtaggggttaacttgaacaccgctagtccacaactcttgcaacatatttctgggttatcagcgacgactgcccaaaatattgtccaataccgtaacgaaaacggcttatatcaaaaacgcagtgaattgaagaaagtgccgcgcttaggccctaaggcattcgaacaagccgttgggttcttgcgaatcatcggtggtgacaacccgttagacaatacggatattcatcctgaaagctatccagtagccaaggcgattttaaaatcgttgggcttaaccttgaaggcgcttgggacaacagaattatcagcagcaattaagtcattaacagtgactgatttggcgaccgaattagcggtcggctctgaaacgcttgaagatatcttaagcggattacaaaaaccaggtcgggatttgcgtgatcaaatgacagcaccactgttacggcatgatgtcttaaccctcgccgatttgaaaccgaacatggccctagaaggaaccgtgcggaatgtcattgatttcggtgcttttgtggatatcggtgttaaacatgatggcttagttcatatttctcaattagccaatcactttgttaaacacccgtctgatgaagttgcagtcggcgatgtcgttcaggtttgggtcttaagcgtcgatcaagaacgtgaacgggttcaattgacgatgaaggcgcctaaagcaactgattaatgatgacggatcaagaattaacgcaacttatccaaaatatttcagtaaccacgtttaatcggccgtttagccaccaggcaaactttaatcggcgcctaaaaacaacagggggtcggtatcatctgcaagaccaccacatcgatattaacccgtcgatggttgcccaaggacaggctgttttagaaggcattattaaacatgagctgtgtcattaccacctgcatttattgcaccgtgggtatcggcatcgagaccatgattttaagcggcttttacaaaaggttggtggtgcgcgctttgcaccaccggtcacggctaaaaaggcaccacaaaaacgactagcctatcaatgcaccaaatgtggccagttgtatcaacgacaacggcatatcaatacaacgcgttatgtctgtcgtcgttgccatggtcatttaaaattagtaaaagaaatttaaaaaaagaagtgtgccataagtattgagagattaaaaacaggccctgagacaaaaataattttgtcccagggcctgtttttttaaacttgtcggagcgtttggttttgtgtcacaaagcctaatttttgatagagttgcagggcggattggttattgcccaagacggttagctccaaaaaggcgagttgtttttctttttgccaagtacgggcttttgcaagtaacgccgttgcaattccttggcgacgatagtcaggatggacgtataatgcagtgacgtaggcaaattgatggctgataaagagattggaaggactagtttgtgctgtggtaacgtgacaaaaacccgttatctgatcctgattgcgagtgatatagacagtttggcgtttgtcttcaaccatcattttccaggtgaagaaatcaggactgctcttttcttgataattagtcggctggaatgcgtgcatttcagttgttaaagcttgataaagcgttgttaaggcaccaatatcggttaaattagcggtttcgataaacatttttggcctccagagcgattttttgttgacttcaattcgggtttctcttatactaatgtacgtggcttaaagtcataaagcaagtatcgcgggtgtggcggaatggcagacgcgcaagattaaggatcttgtcgggaattttcccggtggaagttcgagtcttctcacccgcatatgataacaagttaaacgataccgttagcggtgtcgtttttttgtgtcctaattaagtttgagaattgaattcaatttcgtaaatcgctataatgggcaataagttaatgggagaggtaagtagagatgacacgtaattcatcagcgtataagatcagcattctagcgattctaacggcattgttaatgattcagagttttgtgccgatggttggttatatttatattctaccagggttacccggcgtcaccacgatgcatttaaccgtcatcattggggcgattatcttaggtactcgtggcggcgcaactctaggcgcaatctgggggacgttatccctgattcacgcctatacagcgccagtcgatgcattaaccttattgatcttccaaaacccggtaatcgctattttaccgcgtttgatggtggggttagtggccggattattatatcaacacttacacaatactaaagcggggcaacggggctcgatggcaatcgccgctttctttggcaccatcgttaatacgacgttagttattctattgacgtgggccttttatagccaacaagcagccggtatttataaaacggatgtcagtcacttaattatcgtgatgttgagtgctgtagcgattaacgctttgatggaaatagccttagcggtgattgtgacaccgtttgtggctaagccgttgttaaggtttaagcgcgaataaaaaagagttgggacaaaaattacttttgtcccgactcttttttaagtgattagtctaattgtttttgaactttcttagcttgagcagtgaccgtattgatattaaccttagcgatttctgcttgttggtagatggcactataatattgatttaatcggttgataggtgccgctagatcgtccgcgtgtgcatcagctgatgtgtgatcggcataaaagtcggtttcagcagtggtggcagcgtcgtagaaattagaaagtgttgtgtaatcaagtgcagacagcttcaagctctgatttaaatccttgatgaattcaattggtaattcatcactttcttgattagcaattttaatcaagcgcttaacgactggctttaattcagcttgttgtgccttgagtgtgtcataagctgcggttcgtgttgcggcagtttgcgcaattttagagcccttaacctctaaaagattttgatcagggtatttttcttgaatcttaagataactatcaggcaccccttgaccagcattctctaaggtactaagcgctgtttgttgcgttttagaaatctgtaaaatagtgttgaggtcgtctttgacctgttgtttcgtatcaagtggtttttcgcaaccagcaagtagaaatagtagtcccaaaatggggagtaatcgttttagtatttttagcattgtcaggcactccagtagttaaattcgttaacttcatcttagcgtaaatcagtctaaaagccaaccgtttaccatggtggatgacggaaaaacgtcaatttaatggaaagtataaaagttcggttatcgtagaaagaaaacggtttattttttagtgtttagggttgtttctctttttttcatgtgttacactatgtttgtactttttgacaggttatggttcgaatgtttccaaaagaactttcttccatcgcaccgacagaaatacacaaatttataacgtgtctaacgacacaaggaggagttttctcatggaaaacggaactgtaaaatggtttaacgcagaaaaaggttatggctttgtaactcgcgaagatggtagtgatgtattcgtacatttctcagctatccaaggtgaaggctacaagactcttgaagaaggtcaaagcgtttctttcgatatcgaagaaagcgatcgtggaccacaagccgttaacgtaaacaaaaactaatttataaatattagtcgtggatcaactgtcaatcagttggtcctttttttatggctaaagaaaggcggcaggatgttagcttatcaaatgattgccccaaatgagcgggagaattacttaccttatttacgattagcagatgaagaagtcggcatgattcgtcgttatttaaacgagggtcagctctatagcattcacttagccggccaatcaaccgtaattggcgttatgcatgtgacgtttgttgaccaaacacaagttgaattgaaaaatatcgccttattgccagcttatcggaatcaaggttatgggcaacaagcgctcaacgatttgaaacagatgatggttgacttagggtaccagacattactagtgggcaccggggatggtagcttggcagcaatcggcttttatctgcgccaagggtttcgtttcgatcatattcgtaaaaacttttttgaacaatatcaagcaccaattattgaaaatgggattcgattgcaggacatggtggtgttgagtcaaccactataagaggccaacataaaaaggactaggacaaaaaaatgcttttagtcctagtcctttttatcattaatccttttaaattaagtctgaaggttgttcaaatgggtaaacaaaaccccattgtgcgcgggcgtcggtcataatgtccatgacgtcgcttgttagggcgagtgtgtcattttcttgatgactacgaacaacttcttggaagtcgtgtaattcgtagttcatagcgttggtagcatcgcccgcttggatgatttgagtagtcccatcagggaaggtcaattgggccttatctggtcgtggataatcatcgaccgttacgtagcctttttcataaacgaggacgccttgtttaggcatcttcgcgtgaaggttaagggtcacggtcaccatttcttgatgagcattgttaagaaggagtgttgattgttgatcgacaccgaattctgatgggacccactgggtggcaatcaattctggtttagcactcagcatccgccgggcaaatgcgagggcgtaaacaccgatatctaacattgcgccaccggctaattcgggattgaaaaagcgattagttggatcgagttctttgtagctcccgaaagtgacttgaattgattttaaagcgcctaaatcttgggcaacttgttgacgttcaatttctgcaaaaagtggcatatgataaatcgtcatggcttcagccaagattaaatgtttttcggccgctagtgctttagccgcatttaattcgcgacggttcattgtgatggctttttcgcaaaagacatgtttaccagcgtttaagctcgccataatcccatcaaagtgatagttgtgaggtgtggcgacgtagataatatcaatggcagggtcggccaacatctcagcgtagctaccataagcatggggaatatgatactgttgggtgaaggcgtttgccttttctaatgaacgagaagcagcaccatagatttggccgtccggttggttgaagtaagttgcaaaactaccggcaatattgcctagacccataatgccccagttaagagttgtcaaataaatcagtcctttactatcgtaatcggttccaaacgatattataacaataaaaaaacaaaataggaattaaaggtaattaagcagattaagcattggtcttcgaggtaattttgtgtacaatataaagtagattgaacgaagtagaggcagattagtggcgaagaagaaaaaacggcgcacgaccaaaaaatggtacaacactaaaaagagacaaccgacagaatggctagtcgtcctgttgggcgttttatttgctctgggagttgggttagtatatattcaatacaccggtgcacaaactcaggaacgcttagccaatgaggccaaacaagaagaattagctaaagtgaagaagaaaaaagaattcattaatcaattagcaccctatgcacaagaattacaacaaaaataccatgtgctttctagtgttacactggcccaagccatcttagaaagtgattggggcaaaagctcacttgcagcggattaccataactattttgggattaaaggcgatgacccggataataccaaagagatgaccactaaggaatacttgaacggccaatgggtgacgactaccgcgcgctttcgcgtttaccgtgactatcgcgagtctatgttagatcacgttttactctttgcgcacgggacctcttgggatcataatcattatcaacacgttgtggcagccaccaattatacacaggctgcccaagcgctcaagcaagatggttatgcaacggatcctaattatccggagaagttaatcgaactcgtcaagacctatcgattggaccaatttgattgataaacactataaataatcttgtttatgataataaatcttgaaaagtcttaattaaagttgtcgctagcttttatttgtggtaacctatttttaattcaatttcagaaaacaagggagtgctaggtgtgcggttattagaggaacgtattaaaaaagatggtcaggttttaggagaagatgtattgaaggttgacaacttcttaaatcatcaagttgatccagaactcatggcagcgatgggtgaagagtttaagcgattatttgaaggtgccccaattactaaaatcctaacggttgaatcatcaggcattgccccagcagtcttttctggccttgctttccacgttcccgttgtttttgcacgtaagcacaagagtttaacactccaagataatatgtatagcgcaactgtttattcatatacgaagaaagttaacaaccacatttcaatttctaagaaattcttgaacgaaaacgatcgtgttttagtgattgatgatttcttagcaaacggtcaagcagttgaaggcttattagaaattatcgaccaagctggtgcccaactcgaaggggtcggcattgtcatcgaaaaaacattccaaaagggtcgcgagttattagaccaacgcggcattcacgttgaatcattagcacggattgctgcttttgaacaaggcgaagtggtcttcctagacgaaaataacgaaaattaatttgaaaaaggccagtgatggtctttttttgtgcgaaaaatatcaagatttagttaaagtactaggtagttagggatagaattcgctataatagaagtatctgagaattgaagtcatgtgcataagaaagtaggtagaaagatgccagttatttatccgggtcaaacgattggaattattggaaatgatcaacgtgcgtacaagttggctttaaaagctaaggaaatgggctaccgcgttgcggcaattgtcaccgaacagacacaagattcatcattagccgcagtacttgatattcagattgaaggcgatccacagcaatacgaaacactcgcacgtttaggcgattgttgccaggtgctcacgtatacggatgaatcgctcgatgaaacactactagaacagttggttcaagattacaatgtcccacaaggtagcgatgcgctctcaatgacgcaagatcgttacctcgagaaggtctttttgagtgatctcaatatcaatatctcaccatatgtgacggtggttgataagacggatattgaacaaggggttgattcaattggctatccctgtattttaaaaccgattcaacgcggcttcggtcggcaatatcatcaataccttgaatcaccagccgatttggccaagatggatgatacgttggaattgggtgcctacttattagaatcatgggtccctaaacaacaagaattggccgtgatggttgccaaggattatgaaggccaagttgtcacgttaccgattattgaaaatcagatgcaagaccaagatttacaattatcaattacgccggcacgcatcgatcaagatgtcgcagaagaaattgaacgcttagcgactgtgattgggcaaaacctagattatatgggcatcttcgggattgaattcttcttgaccgcggatatgaacatctacgttaagcgaattgtcaccgcaccacatgaaactggggatgtgcttaaccgcattttgaacttttcacaatatgaataccacttaaaggcgatttgccagttagcaattggcccttcacgcttaaataatgcgggtgtttgtttaagaacaacgccagaacaatggccactgattcaaacacaaatgaagattaagccggattggtatttcaatcgttgccagacaattggtgcgcaagaaagtggttatatcacagctgtagggcataatattcaaccactattagataattttgaagcagcggaattaatttaaaaagaaatcgaccgttagttgatgctttcaactgaacgtatttggaggaagaaacatgttagaacgttatacacgcccagaaatgggtgccatctggactactgagaatcgctaccaagcttggctagaagttgagattttagccgtagaagcctgggctaaattaggcgatattccagcggaagacgccgctaaagtgcgcgctaatgcgagctttgacgttgaagaaattaaccgcctagaagcaattacacatcatgatgtggtcgcctttactcgcgcagtttcagaatcattgggtgccgaaaagaaatgggtgcactacggtttaacgtctacagatgttgttgatacagcacaaggctatattttaaaacaagccaacgacttaattcgggccgatatcgaacggtttatggccgttttgaaacaaaaagcttacgaatatcaaaatacggtgatgattggccggacacacggtgtgcatgctgaaccaacgactttcggtttgaaattggcgacttggtatgctgaaatgaaacggaatcaagaacgttttgaacgggctgcagcaggcgttgaagctggtaaaatcagtggggcagtcggtacttttgcgaatatctcaccagaaatcgaagcttacgtgacagaaaatcttggtattcgggcgcaagatatttcaacacaagtcttgccacgtgatttgcatgccgattacattaatacaatggcagttgtcgcaacatcaatcgaacattttgctactgaaattcgtcatttacaacgtaccgaagttcgcgaagtggaagaattctttgctaaaggtcaaaagggctcttcagcaatgccacataaacgcaatccaatcagttctgaaaatgtcagtgggttagcccgtgtcattcgtggtcacgtcatcacggggatggaagatgtttcattatggcatgaacgggatatttcacatagttcagcagaacggattatcttgccagatacgacgattttattagattacatcttaaaccggttcacacggattattgaaaaattaactgttttcccagaaaaaatgaaagccgacatgaatttaacgcacggcttgatttacagccaacgagtcttattgaagttagttgattctgggttaagtcgagaagcagcttacgatttggtacaacccaaaacagcccttgcatgggatgaacaaaaagatttccgtcaattattagaagcagatccaaaagtcatggcacaattaacaccagcagaaatggacgacgccttcgactaccactggcacctcagccaagtccaaacaatctttgacagagtatttaaataagagtggttttgttagtgggtaacttctgaggattaggctaatcaggcgaataaccgacaaagtcggttgtttgactgaaggactaaacgcaagaagttgctaacaaaagcacgtttcaaaataagagtggttttgccaacgggtaggctctgagcactactcaaacatcaaaaaaacggcgctgggacaaaattaattttgtctttagcaccgttttttgtattcaaattttgatagtttaaacgtgttctatcagtcatctctttacggttaatgccgaatggcaaacgattgctggcgcaatcattcgccactctctgttaatcctcaggagatacccgactgatggcacactttcgttttttagcgccaaataaattccgattcaaatggacattcatggtgttgattgctgagggccagttcaaatgctttttgccctaaagtgaaaaagtgatggtcaatcgttggcatttttaggaggagactcgagagttgcttttcctgcccaattaaaatggggacggggagttggtggtccaaatgatattgccgcacgccagccgcgatatcatcaccattagtaaaatagcaattaagagctggttggcgtgcaatcagttgttcggcggcgcggtagccatcttcaaaagagcgcatgccaccaatcatcaattgctgatccggcttttggtgaaaaatctgttgataagcgcccgtgacagccacccaagtggggcttttggctaaattgcggctcaagagtagcccgatttgttgaacctcaagcgatttaaggtagttaaatgcggctaaataggccggttcacggttggaatacaccgctgaaatatggtgctgccccggattttcacagcaaacaatctgaccgtagcgtgtatagtcttctaaaactgcaagcggcagttcgtgcgaggtaaaaatcaacgccgtaaaattcttccgcttcaactgctcgaggtaatcgagctcaacggttcggttgtactcagaaggcagtaacacaatgtgatagccactcgaaaaagcggcgtccatgatcccatttaagagttgattgaaatagggatggtcattgtgtggtaggacgaccccaatatttttattttggccaaagcttaaatcacgcgccaaactattggggacgtaatccagttgcttgatgaccgcttcaatcgcttctttggcagcgtcagacacgtatttttgttgatttaaaacgcgggagacggtcgaaaccgaatagccgctttttctagcaatatcacgaatggttggcatgattttaacctactttttgattaacttttgtaatgtattttttaatcccgtagctaaagccactatgatgattggttttagtaataaattgaccggcagcttgaatttgatcacttgcattgcccatcacaattgggtgcccgacgatgcttaacatcgataagtcgttttgacctgcaccaaaagcagcacagtcggcgggcgtcaagccggcatttttgagaatagtcattaaggcctgtgctttagtggcttgttgactggtgatttctacgtacattgtacctgattgttggacggaaaggccaggtaagtgaagttggtcaatgaattgtagaacggctgtgcgttgttcatcttctggcaccatcagcatcaccttaaaaattttaatgaatggatttttcaactggtcgtcaaaattaatgatggttggtaagagcccggtgagttgggcctcagtttcaattccggcatcaattttttgtgtgtaccaatgctgtaaatcataagcacttaaactaatgtcgctaaattcggtttgtaatgcagcgactagttgtgcgacagttgttgttacgagtggatattcggctaagaccatggggaataaatcggtaggtttgtagatgaggccgccattaaaagcaacttgtggggttgtcagtgcgagttgctcaaccgtcgcctgcatttcttgcggcgaacgggctgaaactaatgagattggtagcgggcttgttttgaccgttgcgatatctttttcggaaagttgtcccgcctggtttaacaatgtgccatctaagtcagaaaaaatatatttaatcataatgaatgccacctttcttggattaatgtgagtataatttatgaaacgcgtcccaggtcaaggcataagattgaccagaattgtaatccggttactaaggcgtgttcgcttttttctacctatctagtttgttataataaagactaattgcaattacggaaggatgactatatttgtctgaacaagagctcttaaaaggaatgaatcccgaacaagctgaggcggttctaacaactgaagggccactgttaattatggcgggtgccggcagtggtaaaacgcgggtgttaacgcaccgtgttgcgtatttaattgaagaaaaacatgtattgccatggcgaattttagccatcacttttaccaataaagcagcgcgcgaaatgcgtgaacgggtgggcaacttactaggcgaaggtgctcaagatgtttgggtttcaaccttccatgccctttgtgtgcggattttacgacgtgaaattgaacaaatcggctataaccgggccttcacgattgcggatccttctgaacaattgacgttgatgcgccatgtttgtcgggatttaaatatcgatactaaaaaatatgaacccaaagcaattttagggacaatcagtaaagcaaaaaatgcgcttcaaacaccagcggactatcaaggtttagcgaatgggccatttgaaaagatggcggccaaatgctatacggaataccaaaaacgactccatcaaaaccaagcacttgattttgatgatttaatcatgcaaacaattcgcttatttagagaaaataaggaaactttggcacattatcaagaaaaattccaatacattcacgttgacgaatatcaagatactaatgaagcgcaatacacattggtgaatatgttagctgagaagtatcaaaatctctgtgttgttggggatgccgatcaaagtatttacggttggcggggtgctgatatcagcaatatcatgaacttcgaacatgattacccagacgctaaatcagtcatgttggaacaaaattaccggtcaaccaagaccattttggaagccgctaatggcgtcattaatcgcaatactttccggaaaccaaaggaattgtggacgcaaaatgaagaaggccaaccgattacgtattatcggggccagagtgaacgcgacgaatctttatttgtcatcacgaagattcaagaagaaatgcaaaaaaataaccgtaaatacggcgactttgcagtgctttatcggactaatgcgcaatctcggacaattgaagaagcgtttgttaaagctaacatgccttataaaatggtcggcggacacaaattctacgaccggaaagaaattaaggatatcctcgcttatttacgtttagtggttaatgcggccgattcaatgagttttgaacggatcgtcaatagccctaaacgggggattggccctggcacgctagaaaaattaggtcagtttgctgatgatcaccaatggtcattattggaagctgcacaaaatgctgaattatcaacgattcccgctagaagtcgcaatactttaatcgactttgggaacgtaattggcgatttagcgaagatgcgtgaattcttaaacgtgacgaacttgactgaacaattattggacaagactgggtacaagaaggcacttgaagttgaaaatacattagaatcacaaacccgtttagaaaatattgaagaattactatctgtaacgaaacaatttgatgagcattatgaacccgaagaagaagacagtgatttatttgtggacttcttagcggaattatcattggtttctgatttggattctgttgaagaagaagctagtgaagtcacgatgatgaccttgcatgcggctaaaggccttgagttcccagtagtctttttaatggggatggaagaaggtattttcccactatcacgggcgttattggaagaagacgagttagaagaagaacggcgtttggcgtatgttggaattacccgtgctgaaagtaagctttatttaacgaatgcttattcacggatgttgtatggtcgtcaacaaagtaaccaagcttcacgatttgttggtgaaattgatgataaattattggattacgcgaacggcaatgccggcagtattccagaacgtaagctaccatttggcaagtcgaatagctacgccagagcaaccgctacgacgtataacgggcctaaaacaaccactagtcataaaattgccgatacaaccggtggcgataagagtggtagttggcaagcgggccaaaaagtccaacataagaagtggggcattggcacagtcgtcaaggtcaacggcacaggcggcgaccaagaactagacatcgccttcaaggaacaaggtgtcaagagactactagcaagctttgcaccaatagaaaaagtagaataaagtgcgcaagcaggcgattatactctgaggattagtgtaataccgcaaataaccggaagagtacgctgctggagcacgtttaaaatcagagtgtctttttacacgggtagtttctgagtatagctcagtctgtcaaataatcgatgcaatcgattatttgacagacgtggctagacggaagaaattgtgtcaaaaacacgtttaaaatcagagtgtctttttgttgtgtttagcaactgagcattaatacaaaatagcacttaatcaaggttttaagattaagggatattttagattaagcggaagttgttacaacaaaaagcacgtttcaaaatcagagtgcgacggtaggcgcctatattttgagcattaactggatttgacgaattgacgatgtaatcgacgatttggcaaattttgttaagcacagaaatatgcctaacagagcacgtttcaatccaacaaaggagtgtccaatatgggtttagccaaaccagttgaagattatacccagagtgaggcggcttcacttgcgcaacaattgcgcgatcaattagccgactacagtcaggcgtactatacacaggatgcgcccttagtggaagatcatgtgtacgatgagttgtatcgtgatttagagcagctcgaagccgcttttccggtgattgtgaccaatgattcaccaactcaaaaagtcggtggccaagtcttaccaggttttacaaaggtcacgcatgagattcccatgttatcgatgggggatgtcttttctgaagccgagttggcagcgtttgaccaacggttacgaaaaaatacggcaacggaaatcgagtataatgtcgagttaaaaatcgatggcttagcgattgatttaatttatgaaaaaggccgctttgtccggggggccacgcgtggtaacgggacaattggtgaagatattactcagaatttaaagaccatcaaggcgattccgcaaaaactaacgcgtcccgtttcaattgaggtccgcggtgaatgttacatgcccaaagcggcttttgcagatttgaatcaaaaacgggaagcagaaggccaagaaccgtttgctaatccacggaacgcggcggctggtagtttacgccaattggatgctaaggtggcagctgcgcgtcaattgagtgcctttatctatacgattgtcacgtttgatgatgtgcaggcgacaacgcaaagtgaggccctccatgttttagctgaattaggttttaacgtgaacccaacgtctgttgtctgccaaaatatggctgaggtacaggcgtttatcgaacaataccaagggacacggaacgatttggcgtatggcattgatggggttgttttaaaagtaaatgatcttgcgctccaacgtcaattaggcaacacggttaaagtgccacgctgggaaattgcctataaattcccacctgaagaagcagagaccgtcgttcgtgaaatcgaatggaccgttggccgaactggggttgtgacaccaaccgcggttatggatccggttcaactagctgggacgaccgtttcacgagcatcattacacaatgcggatatgttacgcgataaagatgttcgattgcttgatacagtgctcttgcacaaagcgggagatattattccagaaatttcgcaagttgttttagccaaacgccctagcgatagccaagcgtacggcataccaacaacttgtccatcgtgtggtcacgatttagtgcatctggatgaagaagtcgcattacgctgcattaatccaatgtgtccggctcaaatgaaggaacaactcacccattttgcttcccggaacgcgatgaatatcgatggtttagggcctcgaatcattacacaactcttagaaaaagagttaatccacgatgtggccgatttataccgtttaacggcggatgatttagcccaattggataaatttaaagaaaaatctattaataatttattaaatgccatcgatgctagtcgtcagaattcgctagaaaggttattatttgggttagggattcgccatgtgggtgctaaagctgcccgtttattggctgaacatttccaaaacttagcagccttgatggcgagtgatcaagaaaccatcattacggttgatacgattggcacgattattgccgacagcctggtgacttattttgcggatagccaagtccaaaccttgatggcagaattagaagcagttggcgttaatttaacttataccggtgttactaaagcccaagcagcaactagtgacagctattttaacggtaagacggttgttttaacgggtaaattagagcagtatacacgtggtgaattgaagcaattgcttgaagataacggcgcgaaggtcacaggttctgtttctaagaagacggatgcgttaattgcgggtcaagatgctggtagcaaacttgaaaaagcacagtcattggccatccccattattaatgaagctgatttagataattatttggcgcagtaggtaaagttcggtataataaccaagagcgcgcgtttaatttatttaacgcgctttaatcggaattaaggaggcaccattctcagtggcaaagtataaaatatgggtcgttgcagcagcaactcttttattgttagcaggttgcacaagtcttccaggcacttcatcgagttcaagtagtaaagcgactaaaaaattacaaacaacgggtaaagtgaccgatagtatgtatgaaggcgtaattgataatggtcagtataaaactagtcagactcgaggattaacaacgcaacagagtaatacctcttttgatgttaagagtcttgagagtgggcttcttaaactatccaaagaacaatttccaacttcaaaatatgttttccaagaagggcaaagtttaaagaccgctcaagcgcaaaaatggttagcacgtaaatcaaaaacgaatacagagggcttaaaccccgaggataatggtcaaaaagatccaaataaacggaatccaatttaccttcaacagatattggaacaagattatttaggcgaagatggcagtatgaagggcatgagtattggcctagggatgaatcaagttgattactataccaaggaacaatacggtgcaacgtttgaaacgaagatttcaaaagcaatgatgacccaacaaggcaaacaaatggctaataaggttttaagccgaatgcgtcaaaagaagggcctcagcgatacgacaattgtcattggactttataaacaagcccctaaggatagtttagttggtggcacattcttcgcttatggggtcagcaaaaaaggcagcacaacgattgattcatggcacgaattgaatcaagaaaatcaagtgctaccagttgtaaatgatgaaaaagcaattaatcaagacgacgcgacagcttttaacagttttaaaacacaagttgaaacgttcttcccgaacttaagtggtgtgaccgctcagacgcattatgaagaaggcgtcttagcaggcatgaatatcacggttaatacgcaattctacagtgaaacggaaattatgagttttacacagtatattgcgacggccgcggataagtatttaccgcgtaacattccgcttgatatctcaattacatctgcggaagggatgcaagcctatgttgggcgtgtatcaggcagcaaaggctttaccacacacgttttcggtagttattaaataagagattcaaaaagctcccggcaatcagttgattgacgggagctttttttaattataggcctttgatagcatgtgcgatcattttttctaggggttgcatcacttgtgctgaagcccagtcaaatgtgagttgcttaatcgttgcaacacttggcattggtttgaacttttcttttttaggttgtgcttttttaacaggtgttgctgtttgtttagtagtagtagttgctgcttctggtgtttgttgttcgctaacggcaggtgctgcttctgcagtaggctgagcagctgtttggcttgttgtgccatcagcatattcccaatagtgctgtgtttgaccgttgacagtttcttcaacttcaacaggagaatcgtcggtgaagtccatatctagagccaagcatcattcacctcttcttcagccgcccgttcttctgcagcttttgcttgcatttctggggtgatgcctgagaaagtaacaccgacagtagaagtagcagctgaaacggattgatgttgaattgttagtccggcgaataggctaaggctagcaacggctaaaaaacgagtaaatgatgtaatggtcataataagttcctccttgtaataatggttaaatgattatttcttctaacgtatttgtctagtcaattatataagtttgaacgtatggttgtctaccattcattgttatgaatcatatcgagtcctaatgagttgtataagatatattgttaccagtaatgataaaactaattagggtaaaaagtttgagatagcaactaatggtaacgattacatgaataagttatagaaaacgaccaaattccgggggatgtcactttcatctagggcaatatatggtaaaattaatcagaatggataaatagtgactgaattagaaaaggggtttactcatgattgataaaaaacaagttcagcatgtcgcagaactttccaaattagctttcagtgatgaacaattagaacaattcactgaacaacttgccgacatcatgaaaatgactgatgaattaaacgaagtggataccacaggtgttcccgtaacgactcatgtaaatggcctcaagaacattgttcgcgaagatgttgcccaaccagggacagatcgtgaaatcttaatgaagaatgcaccagattcagcagacggcttattgaaagtccctgccatcatggacaaggaggaagcctaaccgtggattatttaaacgaagatttacaaagtgttcatgacaaactagttgctggtgacttaacggctagtcaattagtaacggatacattagaaacgattaaaaccaaagaacaacaagttgatgctttcttaacaatcgatgaaaaaggcgctcaagaagcagctgccaaaatcgatgcgcaaccaatcgatgctgataacttattagcagggatgccaattgggattaaagataacttattgacagacggtgtcacaacgacagctgctagcaagatgcttgctaacttcaaacccgtttttgatgcgactgttgttgaaaaattaaaggctaaaaaggccatcatgattggtaaaaccaacttagatgaatttgccatgggttcttcaacagaaacatctgcctttaagaagactaaaaacccttgggacctggataaagtgcctggcggttcttcaggtggttctgcagcagctgttgccgcgggtgaagtggtcgctgctttagggacagatactggtggttcaattcgccaacccgctgcttttaacgggattgtcggtatcaaaccaacttatggccgtgtgtcacgttggggtgcgattgcttttgcgtcaagtcttgatcaagtcggggtcttcagtcgaactgttgctgacaatgcaactgttttacaagccatcagtggtcatgatgaaaaagacagtaccagtgctgattatgacgtacctgatttccgggctgctttaaacggcgacatcaagggcatgaagattgccgtggccaaagaatatatggcagaaggtgttgaaccagctgttaaggcccaaatcgaaacagctatcgaaactttcaagtcattgggtgcaacggttgaagaagttagcttgccacattctcaatatgcggttcaaacttactacatcattgcttcaagtgaagcctcatctaacttgtcacgttttgacgggattcgttacggctaccgttcacctgaagctaagacgcttgaagatgtttacgttaaatcacgttctgaaggctttggcgatgaagtgaaacgccggattatgcttggcacatttgctttatcatcaggtttctatgatgcttacttcaaaaaagcgggtcaaatgcggaccttgattattcaagatttcgaaaaggtcttcgaagattacgatttagttgtgggtcctacaacaccaacaactgccttcaagttaggtgacaagggcacggatcctgtcacaatgtacatgaatgatatcttaacgattcctgccaacatggctggcttaccagcaatgtcagtacctgctggtcttgttgatgggatgccagttggtttacaaatcatcgggaaagccttcgacgaagaatcagtttatcgtgccggttacgcctttgaacaagccacagaatttaacaaaaacgtaccaagctttaaaggaggacaagcctaatgaatttcgaaacaacaatcggacttgaagtgcatattgaattaaaaaccaactcaaaaatgtacagtccatctcctgttaattatggtgcagaacctaataccaacacgaatgttatcgactggggttatcctgggacattgccaactttgaacaagggtgcttacacgcttgggatgatggtcgcaacagcactacatgctgatattgcccgtgatacacattttgaccggaaaaattatttctacccagataatccaaaggcttatcaaatcacacaatacgaacaaccccttggtaaagacggttatattgaagtcgagattgatggtcacaaaaaacaaatcgggattgctgaattgcacgtcgaagaagatgctggtaagaatacgcatggttcagacggctattcatacgtcgatttaaaccgtcaaggaacagccttgatcgaaatcgtctcaaaacctgatatgtcaacacctgaagaagcctatgcttaccttgaaaccttacgtcaaatcgttcaatttacgggcgcatctgatgttaagatggaagaagggtcaatgcgggtggataccaatatttctgtgcgaccaatcggcgctaagaaatatggtgttaaatcagaattgaaaaacttgaactcatttaaccatgtccgtttagggttggcttatgaaatcaagcgtcaatcacaactcttgattgctggtgaaacaattcgtccagaaactcgtcgttttgatgaaaaatcaggcgaaacctacttaatgcgggttaaatctggtgcggatgattaccgttacttcccagaaccagatctaccaccaatgcacattggcgatgactggttgaaagaagtgcaagacaatatgcctgaaatgcctgctaaacgccggacacggtatgttgatgaattaggcttaccagaatatgatgcgggtgtcttaacgaacacgaaggaaatgtctgacttctttgaagcagctgttgccaacggtgccgcacctaaacaagtttctaactggttgatgggcgaagtgaatgcttacttgaacgacaagcaaattgaccttcaagaaaccgcattaacaccagaacatttagctcaaatgatcaacttgatcaaagacggtattatttcatcgaagattgctaaaaaggtcttccaagaaattatccaaaatgatacggatccaaaagcgtgggttgaagctaaagggatggttcaattatcagaccctgctaagttgacaccaatcatcacagggatccttgatgataatcaacaatcaattgacgatttcaaaaatggtaaagaccgggcagttggcttcttagtcggtaagattatgaaggaaacacgcggtcaagctaatccgaaagttgttaatgatttattgatggctgaattaaataaacgataatcgagaattaggagattcatatgcaaaaacgtgcacggttaatttataatccaacttcaggacatgaagtaatgaagcgaagtgttgctgatattctggatattttagaacaagcgggttatgaagcgagcgcttatcaaacaacacctgaaccagcatctgcgcaaaaagaagcgacacgtgctgctaaagatgattttgatttagtggttgccgccggcggtgatggcacgatcaacgaagtggtcaacgggattgccggactggctaaacgccctaaaatggcaattattcctgccgggacaacaaatgattacgcgcgcgctttgaagattccacgtgacaatccagtcgatgcagcgaaagtgattttaaaaaatcaaacgctcaaaatggatatcggtcaagcaaacgataattattttatgaacatcgccgggggcggcttgttgacagagttgacgtatgaagtcccttctgatttcaaatcaatctttggttatttagcgtatatcgtcaaaggcgcagaaatgttgcctcagattaagcccattcaaatgcatcttgaatacgatgaagggacttatgatggtcaagcatcactcttcttattaggcttgacgaattctgtcggtgggttcgaacaggtggcgccagatgcccaactggatgacggtaatttttcattaatcgtcgtgaagacggctaatatggccgaattggttcatctgatggcacttgtcctaaaaggtggcaagcacgttgatgatccacggattatttatacgaagacgtctaagttagtggctcgaccagctgacgaaaacgacaagatgatgattaatctagatggtgaatacggtggcgatgcgccaatgacttttattaacttacaacaacacatcgaaatgtacgttaataaagaggccattccagatcacgcaatcacaacggagacaccagaagagcttgcagcagaagatcaattcgtcaaagaagtcgaagaaatatcaaaagaagatatcgacggtgacggtaaaataggttaaactaaactattaggcgaaaagagtccggcgcaaaactcagttttgtttcagactctttttaaacaacaaaaaagaggttactatgaaaattcaagcaccagtaagaaaaaatgaaaagttaacggtcgatattatggatttgacctatgaaggcatgggtgttgccaaagttgacaattacccattattcatcgaaggtgttttacctgatgaacaagccgaagtagaagtcacaaaggtcaacaaacaatacggtttcgcacgtttggttaacttattaaagaaaagcccagatcgtgttgaatcaaaagctaatatctactcacaaactgggatcgcaccacttcaacacttggcatacccagcgcaattaacgtttaaacgcaatcaaatcttaaatgttttccaaaaagcgcatttggatattccagtccaacctacacttgggatgactgatccaactggttaccgtaacaaggctcaagtacctgttcggtttatcgatggggccttaatgaccggtttctaccggaaacacagtcaccaagtgatgccaatggaagatttctacatccaagatcctaagattgatgaagcaatcaaagtggttcgtgatatcttacgtcgtttctacatcgatccatacaatgaagatacgcataagggtgttttgagaacaatcatggttcgtcgcggttattacagccacgaaatgatgattgtcttcatcacacgtagtaagaaattacctgctgcccgtgaaattgccatcgaaatcaagaaggctcttccagaagtggtcagcatcatgcaaaacgttaatgcagcccaaacaaacgtcatttttggtgatcaaacaaaattaatcgctggccgtgactttattcgtgatgaattaatgggcttgaaatttgaaatttcagcacaatcattctatcaagtgaacccagtgcaaacagaagtcctttaccaaaaggcaattgaagcagctgaattaacaggcaatgaaacagtgatcgatgcttattcaggtatcgggacaatctcattagcagtggctaaacatgctaagcaagtttacggcgttgaagtcgttgaatcagctgtcatggatgcccgtcataatgctaaaatcaatgcgattgataacgttgaattcacactcggcaaagccgaagatgtgatggcccaatggcaaacagacggccttcaagtcgatgctttaatcgttgatccaccacgtaaaggcttggaaccaagctttatcgaagctgttggtcaattgaaacctgctaagatggtttatgtcagctgtaacccagcaacattggcacgtgacttagacttgttagccgcacaaggttaccaagcagaaggcacacaaccagtggacatgttcccacaaacattacacgtagaatcagtaacaaaattagtactaaaatagagtgcgacatcagccgattatctgttaaacacaagaatcagctttaaagaccactaaaaaggccgtttaatcctcatcatcgagggttagacggcctttttagtggtctagggaagaaaggcgtgcaaaatagaatcgtttcgactagaataaagccaataagagaaatgataagagggttaacagatgaaagtaatcgttcaatctaaattactgttatttgggcaatggatcacgcgggttcaaaccaatcatccattgtatcaaattattcaaaggagtttaacgttgttgtttccgtttgtgttaatcggtagtttaagccaattaattcaactgacattatttaatcgccatagttttatcgccagtattttccacttttcaacttggttaacgaagcataattatatgcaggtgccgtttaatagtctaacgagtttaaccttagggattgtggcagcaatcgcagcttttgcaacagcgcgctatacggccaagtattatggtcgggacgaacaactggcaagcatcacaggcttagtggcctatcttttattagccttgcggtatacgcccaacggtgaattgacgtttaatgcgaatttgttggggatgggtgcgctcttcttcggcttactcgtcggttatctggtaggtcttgttttcagatggctagggaaagcgcaacaggttgctaatccgaataacgggtcaattgtggggcgttcattggattcgttagtgccaattagcttagtggtcgtcactgcaattttagtggggttgttactcaactggttggaaatttcaattctaccggatcaagtcatcttaaaattgcagaatttaaaagccaatcaaacgagtttgattttttcactcggaattggagttctcgttacaatcttgacgttctttgggttaaccagcatgccaacgcttgagcagtttggccgtgatgggtttgccgcaacggctaacctaaattacgccttcttgcaccatacgccatggcacgtgccttatccgttcacgttaggaacactttacggaccatttggggccattggtgggactggtggcaccttggctttagtaatcgctatttttcttttcagtcgtcaacgtgatcagcatttgattggccgctggtcgttgatgccggtcctctttaatttcaacagtgccgttttaacgggcttgccagtcttaggaaatgggttatacattattccgtttctgctggtgccactggttaatatggggattgcggccctggcgattgcactcaatttgatgccggcggtggtttacaatgtgccactgggaacgccggggttactacaggcgtttattgggactaacggtaactggatggcattggtgattagtttgctaaatgtgttcgtcggcgttttaatttataaaccattcatccaacttgcaaatcgtttgcaggaaggagttgaccaagatgtctaaattacaacgtaaaagtttaattctccttggcttgagttttctatttttaggcgcgatgatgtggccttctgcacaatggacgcgccaaaacgtggcaactttaactaaacgccatgattctaaaatgtctccggtgatcttcattcctgggagtagcgcgactcagaatcgttttgacgaattagtcaccaaactgaataaaaagcggggcaataagcatagtttattgaaactaaccgtggataccaataatcacatcagttattctggcgaaattaagccgcgggataacgaaccttttatcgtggttggctttgagaataataaagatggctacagtaacatcaagaagcaggccaaatggttctcaatcgcatttacggcgttagccaagaaataccagtttaataattttaaagcggtcgggcactcgaacggtggtttgatctacactgcctttttagagaattacttcaatcgggatgacattaccgttaaaaaattaatgacgattggctcaccctataatttcgaagaaacgtcgctggcccataaatcgcaaatgttaacggattttatcgccaatcggaagaagattccctcgaacttgtcgatgtattccatcgcggggactgagaacttcgaaaatgatgggattgtgccggctcgtagtgttgaggctggtaagtatatttatcagggtcaagtcaagcattatacggaaatcacggttaccggggatcaagcgcaacactccgatttaccgcagaaccagcagattattactctcctcgagcaatatattttaagcaagacgaccaaccgaatgaatcagccgccaaaagcgggggccaattcggatgacgagcaagagcactaaaaaagaagtgtgacttataaaacatgttaatctgataattattcagatatcaaaaagaagcggcggacaaatatttgtccgccgcttcttttttaatgttatagatgcttgtccttatttgctaataattcgccaactgctgggaggctacctaagctgtcaattgctttgttagggagcacgatggtgttattttggccatcggcaacgtgttccattgcttcgatgttcttgaattgcaagtaaagttcgccgttattcaccaaactagagttgattaagttaatttgatccttaaccgcttcagcgacggttctttgactttgcgctttcccttcagcttccaagatttgggtttgcttgttagcttcggcttctagaatattggcttccttaaccccttcagccttacggatggcagcggctttgagcccttcagcttccataatattggcttctttttcacgagaagcacggagtaatttgttcattgattcttgaatatcatgtgcgacttgaatggaatcgatattgacccgatcaacatttaaaccgtagccggcggtcacagcactcaattgttcaaaaagggtgtgattaatttgttctgtcccgtttaaaacatcgtttaaatccatattcccgataatcccacgcagttgggcccgagtatcttgtaccatactcaaaacagaatccttattcttgtaaacatatgaattaacatctgtgatgtggtatttaagtgtttctgaaatcatgaccacaacgttatccttagtgataacttcttgttccgctacttttaacggaatttgtttcatgttaactacttcagtgatgtggtataaaaatgggaagacaaggtggaaaccaggttccaaggtcttcacgtaaaccccaagtcgttctaaaatgcccacttcaccagtatggatcaaggcaaaagatgagaataaagtgatggcaattaaaactaaaatgacaattaataaaatcgttagaaaaatacccatactaaaaacttcctctccaaagtaaaactagtattctaaaacattgtgttgggccgtaactgttaagtatgatggtgatacatcagtgacgacaaccagtagaccagtttccgctggtcccgcaacacggtaatgatataagacgccgaaaaaagaaatcacgcccgccgattgtgcatcgggcagctggaatgttaaccccagtaaacgctcatctagcataatccgcctcctttgaacatattgtagaccattcaagtgaaaaggcaaacaaaagtgacaacgacgaacaaaattgttaggtcgcttgtttgcagttaatgaaaatagtaaactaagcgtattaagcttaagttggggtgaaacgatgaaacgtcgaatgacgccgatttttcaagatagttttcaaaagcgctactggcgccgaatagttttactaagcctcttagcgattgcagtgatcaccggtatttggtggtggctccagaatcgaaccgaccggcctaacgagcaacaatatcccgtcttaggggctcaaattagccaagaagatggctaccaagattatcagattttgaaaaaagaaagcctaaaattcgtttatctaaaagcgaccgaaggggcttcctataaggatgataatttcgatagtaattacagtcgggcagagggctcgggtatgtcagtgggggtttatcacttttttagttttgatagctcacctgaagaccaggcgcaacaatttatcaaatcagtcgggcaagataccggacatctaccaattatggtttatctttcctattacaatgattacgcacaaaaaccaccggcaaaagccaagacgcaacgggcaattgcccggtttgtgacgctcgttaatcagtattatcaccaagattgtatcatcggtggtgcgccggcattattgaagcgctatgtcccaaccaagggcacttatccactgtggcaaacaacgcaacaacggccaacagttggcactaagaacggtttttggcagtataccactgccagcaaaatacctggtggccgagacgactcagaatatcaattggcggttttcaccggtacgccgcaagaatggcaaaaacttaaatagaaatggagcctaaatatgtttaaacgcaaaggctggttattattaatcatcatcgtgattttctttattggcggtagctggggaattaaggaatattattacggtggtgaaacctattacacacaaattacaactgacggcacgaagcaggtcgataaggacacagaaggtaaatcatatgtttcttaccaatacgacctgcccgcatacgatcaggctggccatcaaaaaaaggtgagctttaatagtgctaaaagttcacgcttacaaaaacaagcctaccttgaattaaaggttaacgatcgcaaaggtgtgatgtcatggcaaaaggtagacaaagctgatttaccaaaagcagccgaaaaggcattggctaaacaattaaataggtaaaaaaagaagtcgcccaaattattttgggcggcttctttatgtatggattggcttttattcactgcctcttgtgcttaaccacgcgtactaaacgaccgatttcatcggtcattcagcacgctcagttaatgctcaaaagcggggcacttgaaaagagcactctttatttgattgggtattccgtgtcttctgcttcgtcgtagattgaaaccggttggtggttttcacatgtgattttgagttggtaaccaaaatggtcgagaaaaataagctcggtctcacttaacaaaattaccttgccagttaatggtttgtgatcaatctggataagtaaatttggcgtgatttcaagcgtatgtcgtttatgcgttttttcatcatcgaaagtccaatgacccgcgtaaaaagttgctgttttactggcttgagtggcccgggccttttgttgatattgatgaatcgtttgatcaaataattcttttggttttttaaattcaaaaattcgcatagtcacacctcaattactctctattttagcacgaattacgtgccttgcgtgcaattaattatcggacttaagtcggattttattaagaatcgttaaagaacgcgattatttattaaaatacttaattgaggctactaactagcagttggttttaataggtttttctaactaaaacccgtatactaaaactattaattgaaggagttgactgacatgcaaaaattaggcattattggtacaaattggattacaggccagtttgtgaacgcagcacgcgatgcagaagcattcaaattgacagcggtttattcaagaactgaagaaaaggcggaccagtttaaaacagactatactgcgcccgacgcaaatacgtatacaacactcgatggcttttttgaaagtcgcgattttgaaaccgtttatatcgcatcccccaatagcttacattttaaacaagctaaacaagcaatcgaagcagggaaaaatgtgattgtcgaaaagccggctttcagtaatccggatgaaatggcagatatgattgctatattagcggatcatcccgatcagtttctatttgaggcagcgcgccaaatccatgaagctaatttcaaaattgtgcaagacgcaattgctaaattaccaagcatcaacggcgcaaccttatcgtatatgaaatactcatctcgctatgatgcggttttagcgggggaagaacccaatattttctcaccacacttttcaggtggtgccttacaagatttaggcgtttacgttgtttatgatgcactcagctggtttggccaaccaattgcggttgattatcaagctgaaatgttaccaactaaggttgacggaaaaggggtcgcaacgcttcattacccagactacgatgtgactttaatctttggtaagacagtggattcatacttaacatcagaaatttatggcggccaaagcacaattgttttggataatgctggtacgattggtcaagttgatttatatgaagagggtggccaaaaaattacgtcacttggtgaacaatcacttgctaatccgatgatggctgaagcggcaacttttgcaacgattattgctaatcgcgacacaaaacggtatcatgaattattacaactaagtcaatcggtcaatgccgttttatatcaattaagacaatcggccgggatccagtttgatgcagatcaacattaacggaggcaatacatgagcgtttcaccattatttcaagcactatgggatgaacaagggtttaaggacctttccccaattcaagaagcagtttaccaacctttaaaacaggataaatcaattttgggcctagccccaaccggttcagggaagacgcttgcgttttcactacctttattagaaaagattatgcccggtgaaggtctccaagtcctcatcttggccccttcacaagaactcgtgattcaaacacgggatgtgattcaaccttacgcgaaggcaattgattgtaacgttcaagcgattactgggaaggccaacgttaagcgccaaattgaacggctcaaggctaaaccagaaattatcgttgcgacaactgggcgtttattggaactcagtgaacaacgcaaggtgaaattccatacgcttcaagccatcattatggacgaagcggatgaattattaacggacagtggcttatcagaaacgcgccacattgtgcaagaatcacctgctgatgtccaactaggcttcttttcagcaacttcaacggatacactaaccgatcttgaaacttggtttggtgtgccaattgaaaccatcgatgtgcggtcaatcgataagactggtggggacgtcttacacgccttcattccaacaggtaacgcgcaaaaggtcaatgtcttacggcatttagcgcatcaaaagaattttagaggcttggtaatcttcaaccaatctgctcaattactacaagcagctcaaaccttgaaacaccaaaaggtaacgtatgctgctttatctggccaaggacgccaaacagaacgtcaaaaggcgttaaaagacttccgtgaaggtaagattcaattgcttttagcgacagatgtggctggacggggcttagatattactgacttaccatatgtcattaactttgacgtgcctaatgctaagatcacctatattcatcgggctggtcggactggtcggatgggccgtgaaggaacggtattaacgttggggaaccaacatgatggccgtaacttgcggaaattgttagcgccagaatatgatttagtgacccgttatttggtcggcgatcatttggaagaaacaaaaccagcagttgtgaaggaagccgcaccggttcaaaaagccgctgccacaccaacgcaacaaccaacgaaaacaccggttgctgatgacaaaccaatgggtgaacgaagtaaggcaaaagtggctaagaaaccagtaccaactcgccaacctgctgagccattaaagccaaaacgtaagaaaaatcgtaaacgcgatcaaaagaataagggctatcacaagaaaaacaaagatttaacggtctagcccaaacagagaagaaaccttaatttagttgaggtttcttttttatttggtcggcattgtgagggagtgggcaagctatttattgacaattttagttaagcgtttacaatgtaagtaagggttttatttcgtttgacggacacttgagcgaacggactcgctggaaattgatttttaatttgtaagccttttatctaaattggacaagaccacgttagacctcagttatcgctaacggccttggaacaactagaggcaaacgtgaaagtcagtgacgagctaaattttaggaggtgccgacaatggcagatgaacaaaacttagaaacaatcatgggattgattattaatggtgggaacgccaaaagtagtgcaatggaagcaattcaggccgctaagaagggtgactttgaccaagctgctgctaaattacaagaatcagatgctgcattatcagaagcacacaatgtccaaacagggatgttaactaaggaagccagtggcgaccatattgatgtcactttactaactgttcattctcaagatcatttaatgaacgctattacgttcagagaccttgccggcgaagtggttgatgtctatcgtaagatggctggcttacctgttgaaacgtactaaatttagagaaagagcgtgattgcgttatggaaattaaacaaaatttgagtatgcctgcgagtgatttctatcagaagattatgacgtctgttttatttgatatcaaacaacaaactggcgaaaaaattaccgaagcgcaacttgctaattattcgtatcaaaaatcgtttggtaatcgtggtaaagcaacgctgaaggtcactcaattgatcaaggatcagagctatcactacgaaacaacctcatcacgagggacttaccaatcgagttatgatatttttgccaatggcccccaagcaatccaagtgatttatcgggagcaggccaaggcaaacagtaaactacaacaaacaaatgatttattgatgggtgccgttttaggctttatgagaaaacggggcttcaaaaaaatgttgaagcaaatcgaaaagtcatatctagcgggataaggagagagtttgattatggaatatcaacaattagcaccattcccacaagattttctatggggttcagcttcggcggcctatcagattgaaggggcctatcaagaagcgggtaagggtcagtctgtctgggaccagtttgtccgtattcctgagaagaccttcaaggaaactaatggggatgtcgcggttgatcactatcatcgttatcgagaagatggcgcgttgatggcccgagttggcttgaaagcctatcgcttctcaatttcgtggccacgggtattgcctgacgggcgaggcactgtgaatgaagagggtttggccttttatgatcgcttaatcgatgaattaattgctaatcagatcgaaccgattgttacaatttatcattgggacttaccccaagccttgcaagaggaatatggtggatgggaatctcggcagattattccagattttacagcttatgcagctttattattcgaacgttttggggatcgtgtgcgtcactgggtaaccttgaacgaacaaaatatcttcatcacgcacggctatttaaccgcagaacatccaccagcagtgatggatgccaaacggacttaccaagccaatcatatggccaatttagccaatgcgagtgctattaagttgttccacgaaaaaggttatcaaggtgggattggtcctagttttgcctatagtccaacctatgccctagatgctgatccagtgaaccagattgcggctgatgatgctgagcaattgaatgccgatttatggttggatgtttatgcttggggtcgctatccgaagttaattctgaactattgggcgcgtgaagggttgctgccagatatcacggcagcagatcaagcattactacaagacccattagcccggcctgatttcatgggactcaactattaccaaacgacaaccgtgacggctaatccgttggtcggtggcgttgggttaacgaagcaaaacacttccggaaaaaaagggacgagccaagcgagtggtgtgccagggcttttcaagacggctgacaatccgtatatgcaacaaaccgactgggattggaatattgacccagaaggacttagaatggcattacggcgcattgagagtcgttatagcttaccggttttaattaccgaaaatggtttgggtgcttatgatcgcctagatggtgccggtgaagtgcacgatgattaccgcattgcctttttaaaggctcacattcaagcaatccaagaagccattacagatggtgtgaccgtcattggttacacaacctggagtttcacggatttattgagttggacgaatggttatcagaagcgctacggtttcgtctatgtcgatcgggatgaaactgatgaaaaggaacttaatcgctatcctaaggacagcttttattggtaccaacgcgtcattcgaagtaatgggcaacaattaaattaaaaaataaaggaagttcctgtcaaaacgggaacttccttttttgtgcaattacgcttaaaatagctgtattagataaaacgaggtgcggcgatgacaactcaacaaagaagagacgccattttagcggcgattaaagacagtgaccaaccgattagtgccaagcaactagcgcagacttatcacgtaagtcgccagacaattgtgggcgatattgcgttaattcgcgcgcagggtgtcaatattattgcgacggtcagcggctattattatcaaacgacaacccaacaaatcaccggttatcgcgcacaattagtgtgtcagcatacacaagccaagacgcgcgctgaattaaccgacattgttcaaaacggcgggcgagtgattgacgttacagtcgaccatcaagtttacggtgaaataacggggcaattaggcatcaataacttgacagatgtcaaagactttatgcaaaaaatcaaaaaatatcccgaacaaaaactactctcaacacttactgggggggttcacctccataccatcgaatgcgcttctgaacaggattttgaacggattaaagcggccttgtcagcacttgatattctctacgttaataattagggtgtcttgacacctgtaagcctaagaagtatgataaatacaattcttatcaactttggaggcagatttaagatgacaaaagaacatcatagactattatgggcagcgggtggcgcctggctgtttgatgcgatggatgtgggcttactatcgtttgtaatcgcggccctcgctaaagaatggcaccttaacagtgggcaaatgggcttaattggcagtgtaggctcaatcgggatggcgattggtgctgtcttcttcggcgccttggctgataaaattgggcggcggaatagtttactattctcgctattacttttttcaattgggaatggcttatcagcgcttagcccgtcattaatcgtcttcatggccttacggttattagtggggattgggttgggtggcgagttaccagttgcttcaacgttaatttcagagaatacaccggacgcaacacgcggtcgggcagtcgtcttactagagagtttctgggcggctggttggttagttgctagtttactcgcatatttcgtgattcctaattggggttggcgcgttgtcttattgatcacgtcactccctgcaatttatacgttagttcttcgggagcacgtcaaggatagccacgaaccagccacgattcaaaagccattgccctttatacagcgcgttacgaaattgtggcaaccagcttaccgccaaaaaacggctttattatggtttgtgtggttcttagtcgtcttttcttattatggaatgtttctctggttaccaagcgtcatggtgctcaaaggttttagtttggtcaacagttttggttacgtcttaatcatgaccttggcgcagctacccggctacttttttgcagcttggttaattgaaaagtggggccgtaaatgggtcctcggtagtttcttaattggaacggcaatcagtgcctatttctttggtaccgcccaatcagtcggtctattaattagtgctggcgccttgttatcctttttcaacttgggtgcgtggggcgcgttgtacgcctacacaccagaacaatatccggccattattcgtggtagcggaagtgggttagccgcagcagttgggcggattggtgggattgtcgggccgtttttagttggctatctcattaatcaaaaagtctcaatcacagtgatttttacgatcttcacggttgcgattttgatggcagccggagccgttctcttattcggagttgaaacgatgcatcaaaaaatgacagatgtcgactgaatattgctaaatcaactttacagttaattcacgaggtgcgataatggaagctataggctctcgtggctcaactggatagagcaatcgcctcctaagcgataggttgcgagttcgattctcgccgggggcatattaaagatttgtgctttaaaatcaaaaccgtaaacgttgatatattagcgtttacggttttttctatatcgttctaaaagtctacaaacgttcactaaaaaatattggttgccaaaaattggcatacgattgattagtaactaaagcagattttttagaaaaaatttaatttatccaagtctgagtatttcaacagaagggatacgtgttggttatcaatgctaaacagttcgagtggctgcaagaatatgagcaactcgaccatgacatcaagtatttaaagtggaaccttatgaagacgcacgcggagttgaaccgtcgcattaatggtgatttacgcaatgatcacttagtgaaagggtcgaaaggcgctagggttgaaaaggagattgaccggcttgaaacggaattgcaatggcgtgtccaggctcaacaggatttaaaagagttggttagctcatttaatggcattgaggagcaaatcctccgcaagaagtatattgacggtcaaacgttagaggaaattgcagaagacaacgaagtgcactacacgctgtcttacatccgtaaaaagcacgccgagctacaccgcaggttagattttctagataaatgggatgctgataagtacgaattgcaagttgttgtcggcgaccagttacggtagacttactgaagagtaagtctattttttatgggggaataatttatgattttttgggctacagtatttttaacaattttagttgttgcattgttgataaactttgggatgatgcaatggaaaaatataatgaaaattaaatatattttcaaacaaaaggttgataatgatagatggataatgggcatacaattagctactaaggtgacgatttacatatgtgtattctttcttatattagttctggttatctacagaaacacattagtgaataataaatacatcaaatttttattcgttactcccaaaggatttaattgggtaggggttacatcacttgtagctttgatttcgttcacttttactgcatgggatagtcgcaggaaaattaatgctgatttaatttcaaagagtagagttcaatggattaaagaagtaagaaatatgacagcggtgatggttacgaacgctatatatttaacaagtgtattacctcaggaagtcgatgaagatagcgctaagcgattaagggactcaagtacaacacttttagagaaagcaactttaataaaactgtattttcctgtgaatgattcggacggaaggaataaggatttagtggacatggttattcaagtagaggatgaaatttcaaaatataccaattttattaatgaagaatatcctaagcttgacaaagctaaaattgcaacaaagtttggaaatatacagaagataatgcttgatgatattaacgaactccgtgatgctgttgctgtttatacaaaagaagaatgggaaaaagctaaacatggcaagtgaatcaatgtgacttttatgagacctcataaagtgtatggttttattgattcgggcggtttatagtaatagcatagaagtttgcaagtaaggcacatccaatcgggtgcgccttttttgttgtctttaattaggaggtagcacatgaaaccatgcaatgacatccgcgagaagtaccttgctcagcttaaaagagtgaatgactttgctgttaaaggtggcacgattgaggactacagggcgcaggttaagtgcctgcgatacttagagcgtttcagcgcagcagataataaccttatctttaagcacaaagccagtcagaattaggttgaaagattgaattcgttttcattttcagaaagttgtcaaaggtgattcatattcagcaaaaatatggtaaaatagactcgtattcaaaaatcgcaactaaaaagttgcaattaatctggaggctttttcatgtcattagttaatggtacagaaatctttaaagctgctcgtgaaggtcattacgctgttggtgctttcaacacaaacaaccttgaatggacacgtgctatcttaggtgctgctcaagaaactaacacaccaatcttgatccaaacatcaatgggtgctgctaaatatatgggtggttacgaattatgcaagaacttggttgaacaaacaatcaagtcaatgaacatcactgttcctgttatcatgcatttagatcacggtaactacgaagctgctaaagaatgtatcgaagttggttacaactcagttatgttcgatggtcatgatttaccattcgaagaaaacttagcaaagacaaaagaaatcgttgctttagcacatgctaaaggtatctcagttgaagccgaagttggttcaattggtggcgaagaagacggtatcgttggtgctggtgaattagctgatgttgaagaagctaaacaattagcagctgctggtcctgactacttagctgttggtattggtaacattcatggtgtataccctgaaaactggcaaggtttaagctttgaccgtttagaagaattagctgctgaaatcaagattcctcttgtattacacggtggttcaggtattcctaaggaacaaatccttaaagcaatcgacatgggtattgctaaggttaacgttaatacagaacaacaaattgcatggtcaaaagctgttaaagcatactacgctgcagacaaagacgaagctgaaaaaggctttgatcctcgtaaagttcttgcacctggtacaaaagcaatcaaagacacagttgaatcacgtatcgaatggttcggtacaccagctgttaaataattattatttatcaaaaaagtccaacttcggttgggctttttttattggcatttttttgaaggcttgtgttaagatgatagcaaaatagaggtggggctaaaatggataatgtgacacaatatttggctggtttagaaaatgaacgtgatcgtgagcttgcactgtcaatgcacaagattatttgtacggcgttgccggatgccgaagttaaattggcctacggattagttggctactaccaacctaaggcactttgttattttggcattaacaagcgccatgttggtttctatccaacgaatcaaccgatggctcattttgcaaaagaagtcgcgccttatcaaacgggtaaagggacgctgcaatttaaaaaagatagtgcggcatttccagttgagctcatccaaaatattgcacgttggcagttagcacaagcacaaaaataagcttccccacagtgggcaagcttatttttgtttaatgaccgctcgtcactttaatcccgataatcccaatcacgagtaaaatcacgaataaccaagttaacaaactaagatgttcattgaataaaatcacaccgactaaaatcgccccaacggcaccaatcccagtccaaacggggtaagcgatgctgagcggtaatcctttggtggcgcgaattaaaaagccaaagctaaccaccatcccgataatcgttaataacgtataattgagcttggtaaagcccccgctcattttcatggtagttgcccaccaaacttctgctaatcctgcgattaataaatcgaaccatgccataatataaagcctcctaatgttgtcgcgccacaaaaaaaggcagtcaatcacttcttctaagacctatagaagtgattaactgcccggtggcaacgattaaattaaacctatcatagtaaatttggttagcaaagaaaaggctaaccaatcgaaccgccgattaagtaagtgacgaccattgttaagaccccagttaagacgttgcgtaaaacgcctttgaagtggttggcatgacctaacgtggcacttgtatagccggtaatgattaaggcaacaacaattgacgccacggtcccactgactttgtaaggataaggaatcgctagaattgtgaggattggtaagagcgaacccaaaatgaacgagaagaaggatgaaaaggctgcgtgccagggattaaaatagtggtgtagttcaatgttatatttttcgcggagcgtaatatcaagactatccttttgcatgaaggctgtcgcaacttggttagcgaggggcgttggtaagccctttgattcataggttcgttgtagactagctacttcggcatcgtattcgttttgaatcgcttctttttgaaggcgcatcattgatttttgcgtatcacgttgtgtgctgaccgagacgtattcaccgccgcccatcgaaaaggcgcccgctaacatgccagaaatcccagctaagaagagggtgtattgactttggtgcgcgctagcaacaccgaccacaatcccagcaaccgaaataatgccgtcattggcacctagaacaccggcccgaatgatgttgagtcgttctgatagatgaaagtgatgttctaagggtttagcgttggtggttgtgatagctttcatgagcgatgtctccttaatattgactggtttaacttcattatagctaattgagaaagattatcaatgacttttgggaaatccttcacaacgaaagaatcgtgtcaaatcaattgctaggttagattcgaatggttattaagtacaggtgttaataaggaaaataaaaaggattggggccaaatatgaatttgggaccaatccttgtttaattataaagctggtgttaatagggcctgatggaagtagtaataagtgacgactgtacagataatcccaattaacgagatgaccactaataacttagtggtttgtttttgaaaatagtaataagcggttaaaccgacaaaaaaggttgttaggcaaatcgaaatacctaacagcataagccaaaaagttagcattagttagcccagtcaccgtttctgaagactggtacgatttgaccatcatgtgttaaaccatcgatattcatatcacttgaaccaaccatgaaatcaacgtgtgcttggctacgatttaagccagctgcttttaattcttcttgtgtcatgtcagtgccacctttaattgaaaaggcgtaagctgagcctagagccaaatgatttgacgcattttcgtcgaataacgtattgtagaaggtgatctttgattgtgagattggtgaaggatctggtactaaggcgacttcgcctaaactcttaaccccttcgtccgtttgtaatagtttttgaagaacatcgttgccttcttcagcagtggctttaatcacgcggccgttttcgaaggtgaattgcatgttattcaaagtgttaccagcatagcttaatggtttagtggatgaaatataaccgtcaatatggttggcatcagctgctgagaagacttcttcagttggcatgttggcaacgaatgggcgaccatcgctactttggttaggaccaccaatccaaatatggttttcaggtaagccgattgttaaatcagtgccaggggcagtatagtgaagggctttgaattgggcagcgtttaattcggctgctttagcttgtaatttcttgccgtgttcttcccaagctaaaattggatctggttggtcaacacgggttgtcttgaagatttcagtccataatttatcagttgcttcttgggcttctaaatcagggaagactttatgcgcccaggcaggactagcagctgctacaacgatccaactattcttgttggcttgtgtggcttggcggaccttgagcattgctttgccattggcaagttgggcagcagcaacgcgatcgccatctaagcccttcaaattatcggggtcactagacatcactgaaatccgtttagcattgtttgctaaccagtaatcgtattcttgtttttggaagtctggcacgtcaaccaagcgttcttgcgccttgtgttgcatattgatgcgatcaatggcatcgtcttgccacttgataattacttcagcagcccctaaatcgtaacaagctgccgtaatgtcgcgagcaaattcagcttggctaactgcaatttggatgacaacggtatcgccatcttggacgttgatccccgttttagcgattaatgctgcgtatttttcaagattatgttggaaagtcgtcataaaaaatcctccttaaagcctatttgataccaatatcatagcataggatgattaaaaaaactcgccccaactataaaaacgttttcatgttatttaattttatggtagagtggcattaaagaatctgtttttgagtcaataatgtggtgggaggtgctggtaacatggcacgtaaaaaaagaataaaagcagaacaaatcctcgataaagcatacgaaattgttttgacggatgggttgaaatcaatcacagcgcgtaaattagcaaccgctttgaattgctcaacacagccgatttatcttgaattcgggagtatgtcagaattgaaacaggctgtcttagaacatgctaaggcgcgtttgatttggtatgtcagtgaagaacagcatcatgacgacgcacttgttaatttaggtgtgggctatattcgttttgcgacggttgaacctgaactctaccgggcgttatttattgataatcattttggtgctgctgaaacacgcgcttttgttaaccaagtgacggatattcggctccatgattatcagccactccaacgtctgacaaaagaacagcaacaacaagtagtcaatgaaatttggattacaatgacgggctttgccacgttaatcaacgcgcacctagtgcaatttgatgaagaatcagcctcaatgcaaatcggtgtgatgctaatgcgctgttttgaactggaacgggtctaaagaagtcgttaagaaacgataataataattgtcaatcgtgcgccaaacgtgtagcatagtaagggatagcaatagtaagtagtaggaggtctatttgtgtctaaaattaaagtaatgaccgtttttggtacccgaccagaagccattaagatggcgccactcgtattggaacttaaaaagcgcgatacagagtttgaagcggtcactgttgtcactgctcaacatcgtcagatgcttgatcaagtgcttgaaatttttaaaattaaaccagattatgatttagatgtcatgaaacagcgtcaaaccttgagtgagattacaagtaacgtcttgatgaatctcgatcacgtgattgccactgaaaaacctgatattgtcttagtgcatggtgataccaccaccacgtttgcagctagtatcagtgccttctataatcaaacggccattgggcacgttgaagcaggccttagaacttgggacaagtattcaccattcccagaagaaatgaatcgtcaattaaccgatgttttaagtgatctttattttgcaccaacaagtcaaagtaaagccaacttattacaagaaaaccataacgaagataatatcttcattactgggaatactgcgattgatgcgcttaaacaaacggtgcaaagcgactatgatcacgatattttgaacgtggtggatgctgataaacgcatggttctagtgacaatgcatcgtcgtgaaaaccaaggcgaaccaatgaagcgggtcttcaaagtcatgcgtcaagtggttgagagccatgatgacgttgaaatcgtctatccggttcatcttaacccagttgtgcaagaagcagcgcaaagcatattaggtaaccatccacggattcatttgattgatccactagatgtggttgacttccataacttagccgctagaagtttcttcatcatgtctgattcaggtggtgtgcaagaagaagcaccatcacttggtaaaccagtcttggtgcttagagacacaactgaacgtccagaaggtgttgaagctgggaccttgaagttagtgggcacacaacctgaaatggtacacgatgcaatggttgagttgttagacaaccaagaagtttatgatgccatggcgcaagctaaaaacccatacggtgacggctttgcttcaaagcggattttagacgcaattgcgtatcatttcgaacaaacgaaggaacgaccagaagaattttaaaacatgttataaactaaaagaggcgctacgacagaatttgtcgtggcgcctcttttgattatttcttttctttaacaatgtagactgggcggttcttaacttctagataaatcttaccgatgtatttaccgacaatccctaaacaaaggagttgtaagccaccaatcattagagcaactgagatgagagatggccaaccgcttgttggatcaccgaagataatcgcacggacaatgatgaagattagcgcgattgacgcgataataaacgagaagaaaccgataaatgaggcaattgctagcggtgtttctgagaaagtgacaatcccatcaagtgagtacttgaagagtccccagaaagaccagcttgttgtgccagcgacgcgatcttgattttgatattcaagatatttagtgtcgaaaccaacccaactgaagataccttttgaaaaacgattgtattcagtcatttcaagaatggcatcgaccatttgacgggtcattaaacggtaatctcgcgcaccgtccacaattttagtttgagaaatatgattgataatttgatagaactttttagcgaagaatgaacgaacgggtggttcgccagcacgagttgtccggcgagtgccaacacaatcgtaaccctcaacttcgataccttgaatcatttcaggtaataaagcagggggatcttggagatcgacatccattacggcgacgtaatcaccagttgcagcttgtaaaccggcgtataacgccgcttctttaccgaagtttctcgaaaatgagatgtaatgcacgtgttctggatcttgtgcttgtaatgtccgcattgctggtagcgtttgatcagcggaaccatcgttaataaataagtattcgatagcatgatctggtaattgaaccgcaactttttcaactgctgcataaaatagtgggactgattcttgctcattaaaacaggggacaataattgaaatcgttttgctcatgttaagcctccgttgacttattgaaaatccatttactgaaaatgtagtttgccaggataatcacaaattgatcgataatcttaaccaccatgttaggaccatggagcattgaaatcccgacaaacattatcgcagtatccattatataggatataccacggaagaaaaagaaactagctatttcacgtgaaaaatctctaaaagtcgtgtattttgactgaaaaacccaggttttattagtgaaaaaggcaaatagaactgataaaaaccaagcaatggtattactgagtaagtaatacataccagtatattggtctaaaaggtagaaaacaaccatattgacggcggttgttaataccccgaagactagatacattaattgttcccaatatttatgaatgagattttgaattgttttaatcatgatcgcctcgttttaaaatagtatgataatggcgcagaatacgaccgcgtaaggccatctgccgctcacttttcttgaaggtgtagcttgtcgtaatgtaattgacgataccgacgattaattgatcgacaatcttggctgtcatactctgccaccctaaaaatgagatggcaacaatcatcaagccgttatctaagaaaaaagaaacgccgcggaagaagaaaaaagagagcacttcgccaaagagcgccttgaaagttgtgtatttagattggaacactaaggacttattggtgaaaaagccaaataaattcgccagtaaccaagcaatcgtgtttgctaacaagtaaggccaaatgatggtatggcgaaagatccagtaagtgaagatgttgaccagggatgctagaaaaccaaaaacggtgtaggtcaataaatctcggtatttaaataatagccgcttaataaaagccataaaaagagcccctaaattaataatagaatgtaaaactaaaataagaaaactgggcccaaagcaaaagggaattgccctagacccagtggggaaatattgaattggtggaaacgtgttttgtctggcaaattcttccgtttagctacgattgccaaacgaaccattacatgattcattcggcaaccgggtctatactcagaagctaaacgccagccaaaacactctgacttgaaacgtgctttataaactagctttctgcgcttagcaacatcagtcaaatcagcgattgcatcgctaatccgcctgattaagctaatgctcaaaagctcccagtttataaaccactctgacttgaaacgtgctttataaagctgactcctgtgcttagcgacacttgtcaaactagcgattgcatcgctaattcgccaagttaagctaatgctcggagtcaaaccgctttataaagcactctgatttgaaatgtgctttctaagttagcatcttgtgcctagctacgtctagcaaataggcaacaaagttgactattcaccagcctaggctagtgctcagatgctgaccagcttagagagcactctgttttgctactatttctgctacgaatttttctaagtgttcaatgtcttctgcttctggtgcgaggtcaactttaaccacatctgagcctttagtggcaccggtttgttcgaagacgccggcaaagtcgtcgactactttgcagaattcatcatagaaggtatcgcctgaaccacagacgccgtaaaccttaccggttaaatccatttcttttaaatcttcatagaagtcaacggcttcgtctggtaagtcaccgtcgtcgccataagtgtagctgcagacgatgcagatgtctgtgtcttcaaaatcagaaggatctgcttgtgagatttctgacgtttcaaccgagacgtctaagttttcgagagcttcttcaacgatatcggcaatttcctcgttattaccggtcatacttgcgtaaactacttttgctgttgccattattaggaacatcctttcacgtgtgcaatggtatgatggcccgcaactgacggaccaaaataaagattctgctatatggattatagcaaatgcctagaactaagaaaaggcgttgcgtttaatcttaattaaaaagcagtcggccgtacaatttttaatcagatagcgtataatatgagattgaagatagacagcaagtcacgctgttgatttaccgtttcaacgaatagtgaattggtaacaattattggaggtttcattttgatcacattaaaatctgaacgagaaattaaaggcatggcagcttctggtgctgtcattgccggtgttcaccgcggtttgcgcgatattatcaaacctggtatttcaagctgggtcattgaagaatttgcaaatgactatatcgaaaaacaaggtgctaaggcatctgaaaaaggctttgaaggctataagtatgccacttgtgtctgtgttaacgacgaagtcgcacatgcaatcccccgcaaaaacctaatcttaaaagaaggcgatattgtcactgtcgatatgaccgttaacttagacggttacgaaagtgattcttgctggacttatgcggttggtgaaatcgcaccagaattacaaaaattaatggatgatactcgcaaggctttataccttgggattgatcaagcagttgttggcaatcgcttaggtgatatcggccatgccatccaacaatataccgaagttgaaaacaactacggtgatgttcgtgaattaatcggtcacggtatccaaccaacaatgcacgaacagcctaacgtcccttcatacggtgaagcaggtaagggattacgccttaaagaagggatgaccatcaccatcgaaccaatggtcatcttaggcggtacatggcacatcaaggctaagacagtccctggtgacgattgggaatactacgtctcagcagacggcacagcctgtgcacaatacgaacacacaattgccatcacaaaagacggtccaaaaatcttaacatcacaagacccagaaatggatgcaaaatatttattgtaaaatataaaagcacgtttcagaacagtgtacgtctaaaacaagcaccaaaccaagaagccttcttaaaaaatgagaaggcttctttttttgttttcagaaaactataaggctagcacttaatcatgtataatatacacagatggttacttttttaacatttgatgctcttgttgaaacccggcatgagcgcgtatactaagaatttatgaggaaaaatatgaaatcagacgaacaaaatcaattaccggtttttaaacgggatatttccggaaagcagaaattgattgccttcattaaactgatgattcggcgatcatcagaggccaatatcagcgataacgccaagataattgcctattatgcactgttatcattctttccactgctaattgttatcgggaatatcttgccttattttcaattagatgtgctcagcgtggctgattatgtaaaatcggctgtgcccccgacgattttcaatcggattatgccgatactacaatcgctattgaacaaacgaaatagcggtttgctatccgtcgggattttaggaactttgtgggcagctagtaagggcatcaacgccttgaaaattagtattaatcgggcgtatcgagtcgataaaattcagaattttattctaaaacgcctcatttctctaggaaccacattagtcttactactattattagtcagtttgatcgtcgtttttacattcggacaacaatttctagaatttataacaccaatcttcaaaataccggaagattacattaatgttttcggacaattaaaatggccgattactagcattgtcttattcgtaattctgatttttgtttatttctttgtccccaatgttaagatgcaattgcgcagcgtattaccaggggccttcttaacgacggtcggctggttaatattagcgcaagctttctcattatacatgcggtattttgggacttcttggaatagttatgggacaattggggcttttataattctattattgtggcttaattattcggcaatggttttaatgtttggcgctgttgtcaacgtggcgattgaagaagcgggatccggccaagtcgacgttagtcaggggaaggtccacgatttcatcgaacgccgtaaggagcaaaatgagtcataaatactgttaataattaggcctgcaagtagcgttgtaacaggacgttaacaaaaaagtgatttctttttaacattgattaacctataatgtaattattattctcgtatcgtacaccttgaggaggaaagttagacatgaattcagatgaaccagaactacatcgtcatcatcaccataaacaccataagaaaacatggactccatggaaaatcattctactggtcttaggtatcttggttttggtgggcggtgcttttgctgcgaaggtctactatgatgttgatcaaacggcgaagacggtttacaaggctaaaggtaaaacacagaataaacgtaaggctaaccaagcggttaagcttaacaaaaaaacgccattttcaattttattattaggaacagatactggtgagttaggtcgcacagaaaaagggcggacggatacgatgattctagcaaccgtcaatccgcagacgaaacagaccaatatgttgagtattgcgcgtgattctcgggtcaccattactgggtacggacaaaaggcgaaaatcaatgccgcatactcatatggtgggattccaatggctattaataccgtacaatcatttttgaatgtaccggttgattattatgtcttaatgaatatgaagggcttagaacaattggttgatgcagtcgggggggtcacggttgataatgacttggacttcacttatgaaggtcaccacttcgaaaagggttcggtgacattagacggtgagaccgcgttgaaattctcacggatgcgttatgatgatccccgtggggattttggtcgccaactgcgacaacaagcaatcattcaagcagttttgaagaaggccacctcattgaacttagtgacccaatataataagttcttacagattttagaaaataacatgcaaaccaatatgaccttaaaggatgtcttgaacattcaacgcaattatggggatgcaatgaactttaagacaaaacaattgaaaggaaccgggcagatgattgatggtcaatctttccaagtgatgtcaccggatgaagtttcaaacatgtcaacactactcagaaagcaattagatttgaagtaacaccagtaaggagctaatcagtaatgattaacttcttttcgtatgtggtctagtatcgctacgtaatcaacctttggaggatattatggaacaaacaattaatattgaacagatcttcggtattttacggaaatacagtcggcttatcgtcttatcgacagtgatttttacactattagcaggcattttaacgttttttgtgattacgccacaatacagtgcttctacagaattactagttaatcgtaaacaaagtactgatgctggtgcacagtggaatcaagttcaaaccgatgtccagatgattaatacctataaagatttaatcacgaagccggtgattatggactcagttgccaaaaaaatcaacgatggcaagtctaccaaattagataacgataaaattgcctcgatgattagtatttcaaataatcaaaattcacaagttttctcagtaactgcaaaggcagataatgcttatactgcagccgatatcgcgaatatgacggccactactttccaaaagaaggcgccgaagattatgagtggaactgataatgtttcgattatctcaaaagcaaagcctgatttaaaaccagtctcaccaaagaaaaaattgagtatattagtcggaattgctctaggtctattgataggtattggaattgcattcgttcgcgaactaatggataagactgttaaagatgagaatttcttaacggaagaattagggctaactagtttgggagtcgtcaataacatcgcacctaaagatttaatcaaaaaagcaattatgcggacaagtactttatcgagaagagggtaagcagtcatgggattatttagaaaagaaaagaaactagatcaagacagtatgaaagaaggggtgggattaatcactttaacttcaccaacctcagtgattgccgaacaattccggacaatccggacgaatattcaattctcatcaattgatcaaaaattaagaagtctggtttttacgtcatctggtccttcacaaggcaaatcaaccattagcgcaaatgtcgcggttacttgggctgatcaaggggttaatgtgttattagtggatgcggacatgcgccgcccaacagttcaccaaacctttcaagtacctaacaaaaaaggactaacatctttgttaaccgaagatgagtttgatttcaatacgacaattcagaaaacaccagtggaacatttatttgttttaccatgtggggtcgtgccacccaatccatcagaattactaaacacgaagaagatggataaattaattgttgaattaacgaaacattttgaccttgtcatttttgatgcaccacctgtcatttcagtcacagatgcacaaattttagcaagcaaagtggatgggactatcttagtggcaccacaaggcattgctgataagcgctctgtgattaaatctaaggaattattggatgtagttcacgcacggatcttggggacgatcatgaatcgcgtgaagccagaaaatactggtggttattatggcggttattatggcggttattatggtgctgaagaatctaagaaatagtttaaattgggggaaataaagcatggagatgcaaaagcagaacactagtcgggcgtcgattgaaaatacgcgtcaggtaatgctttttaatcaagctgtattagatcagcgatatatttatcgcggtttgaagcgcttattcgatattattgccagtttggcggggttaattctattaagcccgctatttttggtactggcgatttggattaaagttgatgatccagcgggcggcgttttctactcacagactcgcctaggtctaaaacaaaagaaatttaaaatgtacaagtttagatcaatgtgtagcgatgctgaccagaagttaaaagaccttctcaaatataacgaggtcgaaggtgcgatgtttaaaatgaagaaagatccccgaattacaaaagtggggcatttcattcgcaagtatagtattgatgagctaccacaattatggaatgttttagttggtgatatgacacttgttggtccacgaccacctttagaacgggaaattaaagagtataccgattatgattggcaacgactaatggttaagccgggttgtaccggattatggcaggtaagtggacgtaatagtattggctttcatgaaatggtcgaactagatttgaaatatattagaaaaagtagtttggtttatgatttgggtattctcttcagaacagtcaaaattatgattatgccaaatgatgcatactaagccggggtatttatgaaaatattagtaattaatacagttgaatttacattaaacgggatgtccagtgcaataatgaattactatgagaatatgtcacacgctaatttaaaaacggattttatagttaataagaaaatttctgtagaatacaaagaaataattagaaaaaataaagatagtattaccgtgctgaataggaggtctgtttttgagtactactcaaaactaaaaaaaattttagaaaatggaagttacgatgtaattcacatccatggcaatagtacaacaacctctttggaattatttatagcaagaaatataagaaaaaattctaacactaaaataatagtgcatggacatggggtacaaacaagtcatcctattttgcaccgagtattacgtccattttttaaacggaattacgattatggatttgctgccagcaaagaagccggaagttttctttttggaaatgctgattataaaataatcaataacggaatatctattaatagatttagatataatgaaataaaaagaaatacgataaggaataaattgaaaatttcaccaacaacaaaattaattttacatgttggactttttagccagataaaaaatcagggatttattgtagatatggccaaaaatatggctttaaaagattgtaacattaagttcttattaattggtaagggtccggagaaagaacaagtaaaaaaagatatcttagccaataaattagaagatatgtttattttagtatctcctcaatctgatattgaagattattatagcgctgctgatttatttctttttccatcactgtatgagtcttttggtatagctgtattggaagcagagtgtagtgggttgccgtgcttagtttcggatagggtacctaaagaaattgatcagaccggcttagtaacctttttttctcttaataatatgaaggactgtataaaaaatataggaagtattaagaataataaaaatagattattacagtcgaggactttaaacaattcagaatacgatattaataggattgcaaacgatttgagagaattttatatggattgtaaggtataaaaatatgcagaatattaaaataattgcttctcacctttcgggaaaaggtgggacagaaacggtattaaaaaaagttatggaaagtaactatttaaatagtgaatttaatctcgagctccatacttttgatgatatggcagatagtagttggacgaaatcttttaagtcccaagtatctaagggagggaaaagtagacttttaaatttactaaagtatcttatgctgttagttcattccaaaaatgacgttttaataatactcggtccagaattaataaatattgcaagtctgtatcgtaaaatatttaagggaaggtatttaatagtttcatgggtacattttacgctagaagataattcatttattaatacaaataaattagccttagctgattatcatttggcaatatcgacaggtatcgtgaagcaattgcagactataggtgttgataaaagtaaaattcgtttaatttataatcctgtatcaaaaactgataaacggattaagaaaagtgaggactgccaattcatttatgtaggtcgagttatgctgaatggacagaaaaatattagagaattaattaatagtttagcaaaagttaccgggaaatggagcttaaatataattggtgatggccccgatttagttaaatgtcagttgtatgctgaacaaattcttgggaaagagagccaaagaattacttggtcggggtggaaaaacgatccatgggaagatgtggatagtgctacagcattggtattaacatctaaattcgaaggatttggtatggtattggctgaaagtatcagtcagtcattaccagctatatcttctaattgtgaagtaggcccgtctgatattataagtgacagaaataatggttttctatattctcctggggataccgataaattaagtgaatatttacaattgtttattgatgataaagataacataagtcgggaattaatacctgaaactttgaataaattttatgctgaacaatattttagaaattttggaaatataattactgagtttggagatagcaatggataatacgatagattttgtagttacttgggtagatagtagtgacgctatctggaatgaaaaaagaagtaagttttcagataataaatctaatctcaatggagaaagtagatttagagaatatgatttgttcaaatattggtttagagcagtagaaaaatatgctccatgggttaacaacatttacttagtcacagatagacagacaccaaaatggttaaataaagatcatcccaaattgaaactagtaaaccatgatgaatatattccaaatgagtatctaccaacatttaattctaatgtgatagagctcaacatgcacagaattaaagagctatctgaaaattttgtactatttagcgatgatgtttttttgaatgattatgtacacccagatgatttctttaaaaataatcttcctgttgaatctggaataatttatcctatttttccagaatcagaatttgataatattaggcagattgcaagaaataacttgaacgaatttaatgacgtaaattaagcaagaagatctcgattggtgtatgccaattaagacatttaagtggccgtgaattcaaataccaattaatttgaaccaattggtgatcacttagttcttcaatggcttggcctttgggaataaagcgccgcaaaactcggttacggttctcattactgcctctttcatgcggtgaataggcatgggcaaaataaacctgtgtaccagttcgccgttcaattgtctgatagttagcgaactctttaccatgatctacggtaagcgtcttgagcttgtcttgaagttgactagctagttcaagtacggcttgagtcatggactgactgtcgcgaccatggagccgtttaacaattgtcaggcgactcttacgctccacaaaagtagccacagcttgacctttacgtttaccagaaagtacggtatcagcttcaaagtggccgaattcctggcgagtttcgactttatgaggccgctcctcaatggagcggccgtgattgaacgtaccacgcttttctttagcacgatgacgacgaattccatgatcaggcaaatcgggcaactgtatatcaagccatccttgatcaatccagttatagaccgtcttgtaggcaatccccaccacatgggcaacttgttcaggggaccacttctggacttgaatcttttcctcgatcaagtgtttaaggtttttagtgagcgaagacttccgcccccgttgactaacctttcgttcaaagtcagtttgcgctagcccagcctggtactcactatttagccggtgaagttcgttaaagatggtggtcttactaaagcctaagtagttagcgatgtatcgcaaggaacgtccttcattatgaagcgtttcaatgacaacacggttctggaatgataaaatagtggtgctcatcaaggtccttctttctaatggattgtgtggtaacaccattaaagaccttgatgggtttttctgtccacttaaatgttcaacttaaattttacaatctgccattagattaaataatgttaccataattaataaatattttagtaaacgtttggttactaagcggaatttttcgaaattctataatttgatgtatggaacatcattaatcaagcagatcattaatagcccctataacagatttcctggctttgaggataagcacttaacaacagctcataaaaagtcaacatttgaagtagtttgggagaaacaaaaggatacgttagtaaatacttcaaaacataaatttagagaattatcagacgttaatcactggcttgtaaagtattggaatatttgtgagggtaatttttacccccaaaatagtagatttggtgcttttttttgggttagggagtataaatcagtaattgaagatttgaaagcaagtaagcataaggttatttgtgtgaatgatgaagatgaagttgaaggattaatgacagtgaaggatagtctaataaaaagttttgaagaaaagtaccctaataaatcaaaatttgaattataaaggaatgaatagcatgaaaaataaatatatattatgtgtaaatgatggagaaacaaattcggcaggttcaaaggcaaaggatgatatcactaagtttttagtacaggatagctatactgagattacagtaaaggatgtccatatgcctaaggtaaaaaaattattatatggaaagcgtatgatcaataaggctttagagaaagttaatgatggagtatttatttttcagtatccattgtatagtcgctatttttctaatttaatagtgagtaatttaaagaaaaggaatgtaaaaaaagtatgtattattcatgatattgaatcattgcgattttttaaaaatgaagaaagtggaattgggtttgaaaaggattttttcaatcaatttgattacttaattgtacataattcgaagatgggagattggcttaaaaataatgggattgagactaaacaaataatacttgatatttttgattatgataatccgcaaaaattattagaacctactctaaatcaaggaattatttatgcaggaaatttaaaaaaagctgaatttttaaagaatataaagtctacggtgaatattaatgtatttggaattaatccagcggatagatatccaagtaatgtaatctataaaggtgtacgtacaccggaagaattaccaaggtatctagaaggtagtttcggtctagtttgggatggcgattcaacgagaacgtgcacaggaatgtatggagagtatttaaaatataataatccgcataaggtttcattatatttaagtagtggcatcccagttatagtgtgggctgaatcggctatggcgaaatatattcgtgataataacttaggattagtagttgatagtttagagaatatagatgaaattataagaaatataactgaagagcaatatgaaataatgaaaaataatgtaaaagaaattgcaaagtatcttagacagggcggagcattaaaacacgcattgaatgagataaatagaattggataaactaatgattaaaaatagaaagaaaattagcacagctgaattattgtttactatcatgttttgtatgctttattcatatatattccttgaaacgacaacttttaatatgccagaatggataaaatatttagtttatggatttagtttttttttagtaatggtaaaagtatcgttttttgataaatattctaaaataaaattttttaatatgttaatattcagcattttgaccatagttgctgcgtatttttctagaaactatagtttagttattctatggataatggtgattggagctaacaatattgatttcgaaaaaataataagagtattcttaattgcatcagttattttgttgttagggacattgatagcttcgaaatatggacttataatgaattttacgtatacaagaaatgggaaaataagaaattcatttggagcaaattatccaacagattttggcgcacatgttttatatattgtcttagcatatatatatacattaagagggaagcttgatataaagagaggccttttggtattattagttggattttttgtaatagatcaaacggatgcgaggttagatgcatatctaattattatagtagctattgtattttttatatataacatagccgtgaatagtattcaaggtaattctaagttatcaatcattgcgtatataatggctttttcagtaccagttgcatttgttagtagtaatcttttaacctatgtatatactccatttaataatattatgtataagttaaacatcttattttcggcgcggcttgttttgggaaaacaggcgtttgttagatatccaataaaattttttggacagtacattcaacaaattggtgcaggtggctataatggatatatgtctagttcattaggaaataattacaattatttttttattgattcttcttttgtaaatatgttattgagttatggcatattattttcaggatatttggttatattaatttcgttaagattagtgacaaaggtaaaacagggagattatgtattagtattgatttttatttttgtaacgattagtagtgttgttgatcaacactttttggaagttgcgtataatccattcacattatttattttttctagtatgctttacaataaggatgttgaaaatgaaattagagaattttaaagatatacttgttgcgaacacatcaagtagcgaaattattaatagaattattgaagatcttaacggggataataaaattatcgttaattttataaatgcccattgttttaatatgtattataaagattctaagtatgctgaagcgataaataaatcaacctacaacttgaatgacggtattggaatggagcttggtggaaagatattgggaatacattttaaagaaaatttaaatgggacagattttatgccccgttttttaaattctttggaaaaaagtcctaataagagggttttcttattaggaggtaaagagtcaagtgttttaaatgctaaaaaagaattaaaaagccagtttcccgaattgaacattgttggcatacacaatgggtacttcagagactctggacaaataattaagcaaataaataaagctcacgtagattgtttgattgttggaatgggggtaccattgcaagaaaagtgggtgtttgagaataaagaatttttaaatgtaaaagctatattctcagtaggcgcgtatttagattttacggctatgacaataaaacgagctccaaggattataagaaggttaagattagaatggctttttagattgtgcttagaacctaaaagaatgtggaaacggtatatcataggaaatttacagttcttttttaatgtattaataaaatctaaggatttctgggggaatagtataaaatgacaaattatttagtagtaggttctggcctttttggcgcaaccttcgcatacgaagccgcaaaacgcggtaatcacgttaaggtgattgaaaaacgcgatcacatcgctggtaatatctataccaaagaagttgatggtatccaagtgcaccaatatggtgcgcatattttccatacaagtaacaaggaaatctgggaatatatcaatcaatttgctgaattcaaccgttatacgaatagcccagttgctaactataagggtgaaatctacaacttaccattcaatatgaatactttcagtaagctatggggtgttgtaacacctgatgaagctgccgctaagattgctgaacaacgtcaagtgttaggtgataaggaacctgaaaacttggaagaacaagcgatttccttaattgggacagatatttatcaaaaattaatcaaaggctatactgaaaagcaatggggccaaaaagctaccgacttaccagcgttcattattcgccgattgccggttcgtttaacctatgataacaactatttcaacgatacttatcaagggattccgatcggtggttatacacaaatcattgaaaaaatgttagataacgatttaatcgaggttgaaacgggtgttgatttcttcgataagaaacaagaatatatcgatcaatacgataaggttatctttacagggatgattgatcaattcttcgactatcaattaggtgaattagagtaccgtagtttgcgtttcgaaacagaagaaaaagatgttgataactaccaaggtaacgcggttgttaactatacagacgccgaaacaccatacacgcggattatcgaacacaagcactttgaattcggtaaaggtgacaagaacaagacaatcgtcactaaggaatatccagcaaattggtcacgtggtgatgaaccatattatccaatcaataatgataagaataaccgtttatacaaatcatatcgtgatcttgcagaaacagaacctaaggttgtctttggcggtcgtttagggcaatatcgttattatgatatgcatcaagtcattcacgcagccttacaggttgttaaagatgaattaaaggattaagcaatgaaaattatcaaaaattatctttataatatgttttatcaggtttttgtcttattagtgccactgataacgatgccttatattgcccgtgttttaggcccaacgggtgttgggattaactcatttaccaattcaaatacacagtattttattttaattggtagtatcggggtttcattgtatggtaatcgccagattgcttattatcgagatgataaagcgaaaacttctcaaattttttgggaagtttttctaatgagaatgattacgattttagtagcattattagcattttttatctttttagggttcgagaaatcctatcaccaagcatatctaatgcaagcaattttaatcgttgcggcagcttttgatatttcatggttctttatgggctttgagaacttcaaggtaacggttcttagaaatattattgttaagttaatatcattagcttgtattttcatatttgtccgtggtaaaggtgatttgacattatacattgctgttttgtcaatttctcaattaatcggcaatgttacgttattcccttatttgaaacggtatattaatttacccaattggcgagaattaaaaatttggcgccatttcaaaccttctttagttttgtttgttccccaaatcgcaacgcaagtttatttaatacttaataaaacgatggttgggaaaatggtatcggttgaagcagcaggcttctacgataattctgataaaattgttaagatggtcttggcaattgtaacggcgacgggcacggtaatgttaccacgagtggccaatacgtttgctaagggtgatcacgaacaagttaagaagtatttatatcaatccttcgattttgtgagtgctgtttcaatcccaatgatgtttggaattgcagcgattgcgcctaaatttgctacgatgttttttggacaagcatttgatgcagtaggcccattaatgatggttgaatcgttagtaatactatttattgcttggagtaatgttttgggaatccaatatctattaccaaccggtcataataaggaatttacaatgtctgttactattggtgccgtggttaatattattttgaatgttccattaattatgtggcttggaacagaaggtgcgatgatttcaacggtgatatctgaatttagtgtgacattgtatcaattttatattgtaagaagagaactagatttattacaaatgatgcaggatacgtggaagtacttattaagtggtctgataatgtttattacagttttgacgatgaatattcgattaccatttagtatggttcaacttgttattcaggctttaattggagtaattatctattgtggaatactttattttatgaatccaaggatattaaaatatttgattaaaaataaaaagtaacattaatatttttctaaatgaaaaagtgctgagattttgtaactatgaaatctcagcacttttttagaataaaatgtctatattaacaacttactaaactttttctgcaccctaaatttaatattattagctgttcgccgtgtgatgtttaagtccgcggcgatttcttttaggctggcattggcgaagtagcgtaggactaggaagcgtcgttcacgtgagtcacagacctggtagagtttttcgaagaggtcgttatagatgacggcgttatctgggtcacagcggggatcactgatctgatcgaggtagtccattaaagcatcgtcttcagatagtcggttaacgaagccgatttgtttgttccggccgttttcttgtctgaagtgccgcatcgtggcccatttaattgcttggtaggcgtagacgatgaattcgtgctcatgggtctcaggatcgcctggaaagcgctgataggcgtcgataaaggttagaatggcttcttggtagagatcatcgaaattctcgtgataacgattaatatggagcgatttaagggcgccgtaaataaagttgtcgtcttggagtaagcggttgaaagcggcttggttagatttggtcattgtatctcatcctttaggccgcgagctcgcagtgaattttcccggtaagttcactataacgacttggcggtcaaaagaataacgaccgtttttaatccttaatcacaacaaatagtcggtttaataggcttttacgaattgcattttctgaaacgagtgttatttaatactgaaaactactgaaaaaccaatatttcggttggtttataaatcgcgtaattttcgaataaagccggggacaccttgtaaataccagctaaattcatgaatcggatattccttgtattcttgaatggccgcttggtagatgtagtttgatttgtgaacttctaagtcatctaagagtcgaatcaattgttgcgagttatcaggcaccatactgcataattggcaacaacagtagtcatagctgtggatgatactgctgttaaaacaggattgcagttcgatggtatagccgaagttagttgcgcaaatcccgaggctcgtgcgtagaatccggccgattgcggcacattgatgaatttcggtctctaactgacgtcctttgtagaggagttcgcaacttgtttcattcaggaaagtaatccgcagatgatcaccagcttgttcgtagtatttaacgtagtgtagcgctaaccaactcgcgttttgatgggcagtgccactaagcggtagaaattggtattcaccgttaatttgcgggagtttccgtaggtggccgaagttatgatagatgtgtcgcatttgtgagaaatcaatgagttgttgacggttatactggcgcattaatttgcgggttgaaaggggcgtcgcttgcaggccgttgttacgactgataattaaactgcgatgtttattagtcgctagcaacatggtatcggaattaatacgataatggttgatatacgggcaactaattgattcacgaaagcgcagatcataatcgacggttttgattaaaggtaggcaatctggacaaactgtgtgttggagcgggacggtacgcgtatgtagtagtaacatagaaacctcctaataaactattcaattgaggatagcaaacattaacaagcgcttacaaatttaatgtgattatgttaacaaacaagtgttaagatattaatatttttctcatttttgagcgtctaagggtcacaaatcggcttgagtatggcatactatgattagactatgattaatggggggattctttaaatgaaagtacgcaaagcagttattccagcagccggtttagggacacgtttcttaccagccactaaagcaatggccaaagaaatgttgccaattgttgataaaccaacgatccaatttatcgttgaagaagcaaaagcttcaggtatcgaagatattttaattattactggtaagggcaaacggccaatcgaagatcacttcgattcagcacctgagctggaacaaaacttaaaagctaagaataagacgaagatgttgaagatggtcaatgaaaccactgacatgggcgttaacctctatttcattcgccaatcacatcctaatggtttaggggatgctgttcgtcttgcgaagtctttcgtggctgacgaacctttcgttgtcatgttaggtgatgacttgatggaagatgaagtgccattgagcaaacaattaattaacgaatatgaagaaacacatgcctcacaattggctgttatgaaagtaccacataacgaagttgataagtatggtgtcattaaccctgaaaacaaggttaaagatgatttatacaatgttaagaacttcgttgaaaagccagatgttgataaggcacctagtgatttagccattatcggtcgttacttattaacaccggaaatttttgatgtcctagaaaatcaaaaaccaggccttggtggcgaaattcaattaacagatgctatcgacgaattgaacaagacacaacgcgtcttcgcccacgaattcaagggccgtcgttacgatgttggtaacaagttcggttacttagaaacaagtattgaatacggtttgaaacacccagaagtcaaagatgatttaaagaaatatattatcaaattgggtgaagaattaaaacaaagcgaaaagaaagaaaataaatagagttctgactcgaacgggttggctttgaggattaacaagaaaatggggattatggcgggtttagccatgattcccattttgtggttaaccggaaaaggcagttcgagaagcacgtttaagtgaagggtgctgaccatcgcggttagtaattgagcataaaaaaagatctcgtcattgacgggatctttttttgtaatgaattagtcaatactcttaaggtatttgtctaattcagctggttttttaacttcgtagctccagcctgcagaaacagtttttgagtttaagcgcatctttaatacgatggcttctctaacgtaatttaggacttttttcatgaaatatcacctcctttaaatgagatattgtgactagtactaaagttgccagtgtcgcggcaccgattggaacgactaaaaaatggaagaacagacacaaaactgagaataagccgaaaacgataatcgtgatccgattacgcttaaacttttcatttttaacacgtttatcttctataagtggtgttccaaaccagaaagcaagggctaatagaagcgagaaaataatcgcgatagtggtattgaataatagccattgcgcgagatagatggcaacaatagccagagaaacggatgtcagataacaatttaaataggtccgacagtgatagccgccggtttgtgtatgaatgattctaaagagaatcacataaccgacagtgagccaaaattgatgagtgctgagcccaaataataagatggaggccgtaatcaaaaactcattaattgttagctcaacgccataattgtagaagacttgttcgtctgctgaaatcactttttttctaacgagtagattagtaatcatttttgtaaggttttccaagccaccaacaccgccattattatttttgatcgataggtaataaaacaagcatgtcaaagtgcgtttcatcgtaggctattttataatcaccgtctagtcgatcgatgctcttcttaataatcccgatacctagtccgtgatgttcatgcttaaaccaacttttgttagaaaggtttaccctactacctaaatgggtttcggcatgagagttattaacgattaataccaatttgtgtttgtattcaaaaatcttaacgctaatttttcttttttcagggggcagcttttcggttgcggcaacggcattttttaataagttaattagtatgttggagagggaaacgggttctaacgattcagtctggacttggtccactttaagtgagagttcgatatccttagaagcacatagttgaatattgttgtttaaaacggcatcaatatagacattcccggttaaaacctgggctttaaccttctccaattgccctgtaatctggttgatataattaatggcttcagtatcaagctcattttcaatcatgtatttgattgacatgatgttttctttaaagtcatgtcgcatatgactgagttcaagttcttttttattttgaattttaatttcgttttttaagacagtagaagccgcttgaaggttaagttcaaattcacgattttgatagtagaggcttagttgtgaaaataggtaaatcgttaagcagatagtgatattgagtaaaataaccataattagtattttatgggataacgggcccgtattgttaagttgcaagttgccactgatgatagacatgaaattgtcaattaggatggcaccaatgattaaaatacagttcataatcattaaatagtgatacgaaatatttaaattcagtttattgaaaaagtggtagtagccataaattagaagcaacatgatcgacttcgtcagaatatagaataggatgccataaaaatctgtaacgtcgataacttgtaggatatttttattgagaaggttggagagtattaacccagaaaaaatatcagagaaataaacaaaatagtaacctaatgcaacaaagtaaaagattttaattattttatctttaaatagtaatattgatgaaaggctgacagcgatggggattagcagtgcgcggatatatggtattgattcagagataaaaatagtaaggtatgaatctatcgcaatgagtgtgattagcacagcaatcgcccggcttcgttgaataaaacgcgtatttaaaaataaaatcaatagtacataaaggatggtcacttcaatcacagtcggtgtaacgtagataattagattagtcactgagaatcccccgtataccgcatataaatgcttcttgaacttctttttttcgtcgacggcttaaatctagttcttcaccattatccattaggatgctggtgtttttaatttcattaataaaaattggattaacggagaatttccgatgtgttctcagaaatcccttttcaactagcgaatctgttatttcttggaaggtataaccgataagttcaaattgggtttgatcggccagatggagataaaccttccgattgagtgattcaacgtaaataatgtcatcaagatagacttttttatagagttcttcaccagttgtttcgcgtagtttcagtctaagatatttgttattttcaaaagccacagagcgactcagccgtgccagcaaattatcaatgcgctcactgagatgatctttaggtagaaaatcatagatatcatattgcaaggtatttagaatttcttgttcataacgggtgacaaaaataatttttacccgcttatcaagattgcgaattttgtgggctaacattttaccattaattttgggcatataaatgtcgataaaaagggcgtcgaatacaccgggtttaaaggcatcgagtaggtcggttgcatttgtaaaagtctgataagttgctttgatggctaatgatcgatcgatttcttgagtgattttttttagaaaacactgattatcgtcacaaaatgcaatatttaacattaaaagtgctccttatattacttgattatttaatattctatcactattcttaataaaatagcatctttaacctgtcacgtttttaccaaaaatggctattattatgcccttttaagtcattaatatggcgttaaaagacgattgttaaaagcgctaattacttgaacggttaatataaatgtcgcaacggtaatttttgtttcgaaaataaattaaattaaatgctagaactaagctgattttttagacggcaaatagtataatatccgaatttaattttttaattaatttaaattaattaaaaaaatttttagtgatataaaaaagccactagaccaaatcggactagtggctgtgtaataggaattaaatgaggatgccctcacaatgatctatttcatgttggataatttgagctacccagccagaaaaagcttgttgctgtgctttaaattggcgatcttgatagcttacttcaattgtttcataccgttttgttgaacgttggccaacaagtgataggcacccttcttcagtttgataagggttgctgtgacggataatcttgggattgaccataattacagggagaatccccatttggacgataataatccgtttattaacgccaatcatattagcagccatgccgacacaacgatcggtgttagcttgtaatgtatcaattaaatcggtgataactgctgtatctgcagttgtggcaggtagggccacctggctcaaaaattcggtatcatgcataatcggcttaatcataaaaaaaactcctcacaagttaataagcctattataacagaatcatgttgctcaaagtgattcacgaactgcccaaattgggacaaaataacggttgacaatataattttatttataaaatttaatttatatgaactgaattttataataggctaatcaatattaaagtggtctagtgcaagatagatttagtggtttattgtttgtggtattagtaaactattacaccgagcggtcatataaatggccttaatggtctatattgtaaaaaattagaaaaaaagaaagcgattaacattgctaataaacggtttatcgtattatatacaatgataactattagaatttggaagactttaagctctataacaatagaggggagaaataataaaatgttaagtcaaacagaaacgttatcgtcggttacttatatcatgcgctgcaaccaggtcgttgagaaattattagtatttgatacggtttttaacgaatacacacaaacctgccgtaatatcgtattaggcagatgtttggttaatgagaatctgcattccttgaagaagtatttccagaagaatttggtgaatttgcgacattttgtggaattgactgaaagtattaatccgccaagttattttactgaaactaatcaacggttaaaggaagcttttagaggatacgctgaaagtgttgaaaaaatgttatcaatcattgaaacagagaacgattcgttaatattagaaaaattacaggagatccgacaaattcaaaaagattattgtcatcaaattaatgaagcattggcggatgtcgctaaactcggctaatgctcgaaataaaggtggttaaccgggtaggttaattgccttttttagcatttagaataaataaaaagtttatcttttaggcacaaaatgaataaaaattcgacaaagtatgtgtttttgattataattatgagtatagcattataactaaacttattagtttttaattttaatgaccggtaagagggtatagaggaggattcacaatgaagaaaataacgttatttttgagtagtttgttgttactgggactgtttgtatttggcagtcaacaggtgcaatcagtgcaagcggctgagaagacttatgaaatcggaactgatgtcacttatccaccgttcgaatttgcgaataaggataataagtatgtcgggattgatattgatatcatgaaggccatcgcaaaatcagaaggtttcaaagtgaatatccaacctctcggctttaatgccgccgttcaagcggtccaatcaggacagattgatggtgtgattgccgggatgacaattacggatgaacggaaagcaaaatttgattttgcggatccttattatcacacaggcgttgtcatggcggttaaaaaagacagtaagattactggcttaaaaggattgaaaggccaacgggtcgcaattaagactgggacggctgctggtgattatgcaaaatcaaaggccaaagagtacggctttacaacggttacttttgatgattccgacaatatgtacaatgatgttgtcaacggtaactcagtagcctgtttcgaagatgaaccagtcatgcaatacggaattaagactggtttgggcttgaaaattgtcacaaatccagttcaaggcggcgactacggattcgctgttaagaaaggcacgaacccagaattagtcgctaaattcaacaagggcttgaagaagttaaaagccagtggcgaatacgctaaaattcaagcaaaatatttaaacactaaagcatctagcgaaaaagaagctgatcacagtttcttcggtttattaaaagaaaataagggcgcaatcttagatggcttaggtcaaacattactattaacggtcatcgcgatcttcttcgcaaccatcttcggtgtcttcttcggcttactcggcgtgttaccgaataaatttgcacgggccgtttcggatacagtgatttatatcttccggggcttgccactattagtcttagccttattcatctacacggggattccaagtttgacggggcaaaagattcccgcaatggtcgctggtgtgattacactgatgttcaatgaaggggcctatacagccgccttcgttaaaggtgggattggtgccgttagcgctggtcaaatggaagcagcccgtagtttaggcttaccatatggcaaagcaatgcgtcgcgtcatcttaccacaaggcattcggattatggtgccatcttttattaaccaattcatcatcacattgaaggatacctcgatcttatcaattatcggcattgtcgaattaacgcaagccggcaagattatcattgctagaaacctagaaggcttcaaaatctgggggatgatcgcgttgatttacttgattgtgattacattattgacatggttatcgaagtatatcgagaggagaatgaataactaatgaatagaattgaagtgtcccacctcattaaaaattatggtagtaatgaagttttgaaggatttggatttaaccgttggcaacaatgaagtggttgttatgattgggccttctggttctgggaagagtacttttctccgctgtttgaaccgtttggaagaaccaacgagtggcgaaatcatcgtcgatggttataatcttagtgatcgtaagagcgatttgaaccagattcgggaaaaaattgggatggtgttccaacactttaacctctttaaaaatctcaccgttgctgaaaatatcacactagcacctgttgaactgggcaagatgacaccagaagaagctaaagaaacggctaaacatcttttggaaacagtcggcttatctgataagtacgatgccaaaccaagctcactttcaggtggtcaaaaacagcgggtcgccattgcgcgcgccttggcgatgaaacccgatattctgttattcgatgaaccaacatcagcgctggatccagaaatggtcggcgacgtccttgaagtaatgaagcgcttggccaaagaagggatgacgatggtcgttgttacccatgaaatgggcttcgccaaagaagtggctgatcgtgtcatcttcatggcagacgggcacattgtcgaacaaggcaccccagacgatgtcttcggcaacccacaaaacgatagaacgaaggacttcttgaataaggtattgaatgtttagaaaaagctgtttaaagagttacctggtttaaattactgggtaactctttttttgttgtccgtgctatgataagtgataacaagtagttgggagatttgataaatgatacgtcatattcttgtaaccggtggtgccggttttatcggttctaattttgttcgctatgtggtccggcaacagccagaagcccatgtaacggttttggataagttaacgtacgctggtaatcgggctaatttagccggcttaccagcagaacgagtgacgttggtagtcggtgatatttgtgatgcaccattggttcagcagttagtccaaaaggtggatgcggtggtacattatgcagctgaaagtcataatgataattcgctgcaggatccaacaccttttattcaaactaatattatgggttcctatacgctaattgaagcctgtcgacaatatcatgtgcggtatcatcacgtttctacaggtgaagtttacggcgatttaccgttagtaggtgatgcaaaatttacacccgaaacacgttataatcctagtagcccgtactccgcttccaaggcgagttctgatttgttagtacgggcgtgggtgcgctcatttgggctacgcgcaacgatatccaattgttccaataattatgggccgtatcaacatattgaaaagtttatcccgcgtcagattaccaatattttaagtggtaggcgccctaagttatatggcactggccaaaatattcgtgattggattcatacggatgaccactctagcgctgtttggacaatattgacacgtggccgaattggcgagacctatttgattggtgctgatgggcaacgcacgaatcaagctgttttggaaatgattttaacattgatggggcaacccaaggatgcatatgatcaagttcaggatcgaccagggcgtgatttgcggtacgccattgacgcgaccaagcttcgtgaagaacttggatggcaaccgcaattaaccgattttaaagttgggttacagcagacaatcgattggtatcggcaccatgaggaatggtggcaagcagataaagctaaggtagaagcgagatacgcgcgtaataaacaatgatcgaataatacgtgattttaattaaccccctgttcaaaagaagttaataatagtagtataaaagagaattaatattaagtagtgggggaagataatcatgaagttttgtccaaattgtggttcggagatcaaggagggggctaagttttgtcccaaatgtgggtttaacatcgaacaaatgaccaatccaaacgcaacaagtgacagtgtgaagagccgttttgaaaaattgaaaacggatgaagaaatggcactccaattagaccaagtcgaggggttaaatatgacgcgggcggacatcaaaaaggaagctcaacgtaaattatccggacgttatggcgaatggatgaagaccatcttgtggttggtggtggggatgattgttgtcacatttcttttggtaatgagttttggcagaatgatgacggccattgaaatgacaattttggggaacctctactctgaccgaggtccgaccggatttacggttttcttatggtttgtagtggtgattatgctcttaatagtgctattcttaattgcttgtttacgcaaacccgttttacagtggtgcgcaatcgttactttacgaggtcagcgtgccgatgggttgaaaatttttaactacttagtaaaagcgcaaaagaaccgggtgttaaaagcaaatgttttaaccaccttctatcaattctgctggtcattgttattcgtcattccgggggttgtcaaaggggcctcatacgcaatgactaatgtcttattggaaaaaaatcctgaaatgactgctagcgaagcgattaacatgagtcgtaaaatcatgcatggctataaattagaattcttaatcatgcaatattcattttatttctggcaattattggttggtgtgacatacggtctcgctaatttctatgtgctcccttatcaaaatgtaactgaaattcaattcttagaatcactttatcaacgttatcaagaaaatgaaacgaaatagaaaaaagacaaagtcgtaagactttgtcttttttaatagcctagtgaggcgtgatgacttgtaatttgtgttgcaataaccgcatatttaacggtgatttggtactaggatcgccatcaatgcgtgtttgcacactttcttgattgtcagtggtaattgttattttatcagctttaaagtaggtcattccaggaattttcttaaagttgcctgttagaaaataggggagaaacatagcagagcgcattaatgacattttaggagcgacaaatacatggaaatagccatcatctggttgcgcttcgggattgaattttgtaaaaccaccgacggaattggtgagtgtcacgagcaagaactgtgtgtctttttgccagtgacgatgaggggtttcaattgttaaagggtaatgttgatgcttggctaatacacgaataccttcgtttaaaaaagccaaggggccccatttttgtttctcgctctgggtaacattcaaagcagcgtcagctaaaataccaagcgtcatcgtactgattagatagtcatcattgatttgaccgacatctagtggttggagatggccttgctgtagattttcaatcgcttggtcaatatctaacggaatttgtaaaacgcgggccaaattattaacggtaccagcgggaacaattcctaaataaggtggctgctctaaagtagctaggccactaacgacttcgttgatggtgccatcaccaccgacagcgactacgatatcgaactgcgcttgcgccgctttttttgctaagcgtgtcgcatctttaggggctttagtaggcatcaattcaaccgtctgctggtttttaacgagggcttgttcaatttttttaccaactgactcgccatgatcttggccagaatgcggattataaataacggcataacgatccataaaaagacctcctttattaactaacctaagcatagcaaaaatctcatgaataaacattgaaaacgaattgaggttggtgctgagccgataattgattagcatttttgctaagtgttaaaatgaaactaacgttgaattatgaaagtaggtcaggctatgcaactagggttaaaggcgggtgtgaatgaccgtcaaattaaggatcgtttacaatatcatcccagcgtatttgaatttcatctgacggaagaagatgtcgcaagtgctggtttaaaaaggctgcgcgataagattcaatttatccgtaaccaaggggtgcagcacattatcttacaccatccgatgaattttgaaggcggtcatcttgagttatcgatgagtgaggccagttcaccagcgcgctatcgctttttgtggcagtcaacgttggacttattgcaactcgctcaagcagaagatgttcaattattagtccacggttcatatgatgaacccgttgagcaattgacagttggttatcgcaatctcactgaagcggctgaggtactttttaagcggatggactatctcaacaagattggtcatgatcatctattcttcgaaaattcgatttcaccgcttttttattacggtaatcctgatttagatcaagctattttagcaaaaggctatcgattagcttttgatacgagccattgtttcattaagtaccatggcgataatgacgtgttagttcagagcttacagacgctaaaaccagcgattgcccattatcatcttgttgattcgttaggacttaaacatgatggcttagaactcggaactggccgcattgattggcgccgggttgtgccggttttaaatccagcagcaaccaatatctatgaagttcagttggctgatcaaaatgatgcgcgggaaatggttgcgagtcaccagtatttaaccgctttggcggctgacttgcaacattagccgagcagaattttattttgggccacgcggaaaccaaatagcgggtaagcttggtcatcctgattaacgtaaacgtagtgttgatagtattcacggtgatttaagaggaggctgaattcccattgcttgaggggatgtggcttcttggcgaccatctgtaataacagacgcggttgttcattgtggacatcttgttcaaaaccggcaatcggccaattttgatctgagccttcgaaaaaaatgagtgcattacgtggcgtatcggcgagtaactgtaataaatcaatgacgcgcatgatatcgactcctttgtggcattttaagtagtgtagcgacaatcagccaactaatcaatgagagtaagacgacgattgttaaaatgaccattaacggtgtcagaatagttagtagccaactggtcccactggtagtttgattgaataaactagcgatgaaagtgcccccgataatgacgatcaaggcggcaataattccgggaatcatccctcgataatcggctttcgataagtcgaaaccaccaatagcaatcatgccacagagaatcagccaaatgagtagtaaactgggtttggtagtcgtcagtagctggctgaataatggtttgactgcctgccattgccaaattggttcttcggcaaatgtcagccaagtttgaaaagtattgcgggctagtaaccaagtgaggcctaaaattgccgcggagcaaccaaaaataggtgctaagccaatccagaagttaccaatggtgggccacagccgcccagaacgatagcggtgttcgacgtgtccaagcgagtggtcattagaatcgttcaagttgcgattgagcagttgcatgtcagtaatttgatgattgaagatgaagcaaaataatgcgtggctcaattcgtgaataatgatgccgaggccaccaatcacaatctgtgagcggggccaccagcgtgctaagcgcgttttcgttgagcggttaatcaccgtcaataaggcggcaaatcctagtggcattaaaattaatagtgcgcagttgcgcataatggcaatcaacagttgttgccagtcaatggttagtgtgtttgaaagtgacatgctaaacctaccttaataacttaataagggtcatcgtacacctaagtcaaggatggtgacaagcgaacaacttaaaatttaaagaacatctaaagaaaaaacaagcgcccaggacaaatttgaatttgtcccggacgcttgttttatagtcgaacttttgtgaattctcaggatagccccaactgatacacagacttatttatccgaaaaaattggtgtttcaattcgttcaacgtacttggctgcgactggtgttttgtagagttgaacgtcatctttttcgaagagattggcgttagcgattttggtcatcgccgctttaactacttcgggggttaaggattcgttgacttggcgtaggcgtaatgttttgctcttattaacactcgttttaaattctaaattaagttctttcatcttgaattcctcctaaagaattggtatgttttttacttagcgttataaacagatttggttgtgagttctgccatgatgaattgatcgtcatcatgtaggctagcaagggcttcgccgactgcttggatttcgtcagcttgtacgttttcttttacggcgcttaaacgccgcatgagatgatcgtcttgataagcctcgttttgtaattcgaacgcaattgttgatgttaaccatgatgtttgcatattgaaaacctccaagtttttaattgtaaggtcaccggtgaatcgcttacgttaatgagtaaaccaaatggccgttaaaatggtaatttatttttagattaatcctaaaaattagttaaagaaaagtaaattaagcatacaatcaccagatttttagttatagtaataattagacttataagtgaagagggatattatgaaagaagtagttattatgagtgccaaacgaacaccaatcgggaagtttggcggtcaattagccagtttaaccgcagtcgatttggggacaatcgcggctaaagcagcgattcaagcagctggcattgaagctgaccaaattgatcaagctatttttggcaatgtcttacaagctggttcaggacaaaatgttgctcgtcaaatcgcattaaatagcggtttagcacaaacgagcgttgcgatgactgtgaatgaagtttgtggttctggtttgaaggccatccgtcttgcacaaagtgcgattgtgatgggcgatgccgatgtcgttttagttggtgggactgaaagcatgtcacaagcaccttatttgaataaagggatgcgttttggcagtaagtttggtgatcaaaccgttgtcgatagtatcagtagtgaaggtttaaatgatgccttcaccgataaaccaatggggattacggctgaaaacgtagctgccaaatacggcattacacgtttgatgcaagatacattcgctctagaatcacatcaaaaagcggctaaggcaacgcaagctggctggtttgatgctgaaattgtccccgtaactgtgcaacaacgacgcgcaaccttcgaagtgagccaagacgaagggattcgcccagatacaacgcttgaagcaatgggtaaattacgaccagccttccaagcagacggcaccgttacagcggccaatgcttcaggaatcaacgatggtgcttcggcaatgatcgtgatgtctaaagaaaaagcagaagcactcggtcttgtttaccaagcaacactagtcggttatcaagaagttggcttggaccctaattacatgggttacacaccagtacctgctatccaacaattgttggctaaacaagatcaaacggttgctgatattgatttatttgaaatcaatgaagcttttgcagcctcaagtgttgccgttcaaaacggattagcgttagacactgccaaagtgaacgttgccggtggtgcggttgctttaggtcacccaatcggtgcttcaggcacacggattatgacaactttattgcatcaattgaaacgaacaaacaaaacaactggggtcgcttcattatgtattggcggtggtttagggattgcttatgaaatccaactgaacgaggcgtggctaaatgactagtccaaagttttaccaactgtcaaaatcagaacggttagcatgcttggttgaagctaaccaactttcagaaaaagatgcgcaatttttagcacaaagccaacctttagcagatgaattagccgatagtatgattgaaaattatatcggacaatatcacttaccattaggcattgtgcaagatgttatggtagctggcaaggtttatcaagtaccgatggcaatcgaagaaccatcagtgattgccgcggctaataacgcagcaaagatgatgcgcctaaatggcggtgtcacaatcgaaagcgggcagcgcgtgatgtttggtgaagtcgtgttaactgatttacctcagctagcagatgctgtaaaatgggtggataaccattttgctattttgcaaacggtcgctcaaaaagcacatccgtcaattgtcaaacgaggtggtggtttgcagaaaatcacaacaaccatcgttgaaaatcgttttctgaaattaaatcttgaaattgataccaaagccgcaatgggcgctaatattgtgaataccatttgtgaagcaattgctcacgccgtacaagcgactttaggtgggactattttgttgagtgttttgactaacgccgcatttgggtccgttgttaaagcttcagtgacacttaatccggagactttagcaacggcgaccttaacgggtgacgcagtagcacaacggctgattgatgcgactcagtttgctcagttggatgtggctcgggctgcgacgcacaataaggggattatgaacgggattgatgctgtgattatggcaactggtaatgactggcgggcgattgaagccggtgcgcatagttatgccgcacgcaccggacactatcaacccttaacggattggtcgtggaccactgatcatcaactgcgcggtcaaattgccgtcccattaccagtcggcattgtcggtggttcaatcggtattttaccgacagttcaagttgctcagcgcttgatggtcatcgaaacggccgaagaattggctggcgtaattgcagccatcggtttaggccaaaatttagcggccttgaaagctctcgtttcagacgggattcaaaaagggcacatggcactccaagctaaatcactcgcaattgcagtcggcgcgacagctagcgagttaaccacgttattaccacaattattaaaagcaccgcacttaaatactgaaacagcgacgactttattaagtcaaatccgtgctgaaaacagatagattggaagtttattatgcaaattggaattgataaattgggtctttttaccccaaatacttatttagatcttgtgatgttagcaaatgcgcgcggtgttgaccctgataaatttacaattgggattggccaagatcaaatggcgattgcaccattaagccaagatagtgtcacaatgggcgctaacgccgctttggatttattagaaggtgaatcacgcgacaatatttcattgttgattttaggaactgaatcaggcattgatcaatctaaagctggtgctatctatattcaacgcttattaggtctcagcaatgcacggacttttgaaattaaggaagcttgttacggggcaactgctggtttaatgacaacttatgattatgttgcggctcatccggatcaaaaggcattggtgattggttctgatattgcgcgctacggtttagaaacaccgggtgaagtgacacaaggtgccggcgccgttgcaatgttggtcagtgcccaaccacgtttgatggttcttgaaccagaaacaagtatccacagtgaagacattcaagatttctggcgtccaaactattctaaagaggcctttgcacgaggcaaatattccacagaacaatacatcgaattcttccaaaagacatgggctgattaccgtgctaaaacgggtcggacaatcgctgattttaaggctttagctttccacttaccttatactaagatggggctaaaagcattgcggacaattctagatgaaggcagtgagacacaacaagcacaactcttagaacgctatgctgaaagtaccttgtacagtcgtcaaatcgggaatatctatacgggtgcactatacttaggctttctttcattattggaacactcaactaatctagaagctggcgatcgaattggtcttttcagttacggatcaggtgccgttagcgaatttttcacagggattctacaaccaggtttcgaaaaacaattagcaaagcaaaaacatgctgatctattggccaaccgtcgccaactcacgatggttgaatacgaaacacaattccaaacggaactaccagaagacggtagcgaatatgaaattgacctgacaatggacaacgcgccaattatcctaaaaggcgtgaaggaccacgaaagaatatatatgacaagatagagtggcttagcaaccgggatgattctgaggattagcctagttagggaaataatcgggttgatcgattatttaactgacgtagctaaacgcaagaatcaggttgataaggcacgtttcaaaaagacgattccgataagttaattttatcaaaatcgcctttttattttgggttaaaatactggtatatcaacgttttaaaactttttaaaattaattcaaaatttcgaggtgttttagttgtgaccgattacataaggtgatatattaatggtgaggaaagatagcttggcagaacaaaaccaagtgaaacacatttgttaggcaccaccgtatttgtcaggtactaagtttcaagaagtacagcgtattagaactttagaaccaaataacaacaacacatcgcaagataagattggtaaaagtacactaagtgattgctaggaagtgggtccaatgacaacttaattgcaaaatcaaagcgtataagtgcgagtatatcggaggctgatgtctgttaaagaatatcgtagcagtaacaaacgcaaccttaatcgttatcgctgaagctgcacgcagagtcaatcaccaagaaacgactaaactagatcgagtaatacgataagcagtaggttagaacaaacgattaattacaattgaatatagtattgaggtgtaacattatccagagtaaacaacagaatcagcaagcagcaaccaagctatctacctcgacataaaggggattcaaagctatcaactttgaatccttttttgattgtcatgatttagtatctgaggcttgtgttcgaatctggtccaaatcgattgacttgttgataagttgggcacaactttggcaaattatttgggcgttcgtaatttttaaggtttcgcgaatatccatataaccgttcatgaaacgaccagggggtaattgaatattggtccaacagtgttcgttgacagtgattgtttgttgacaaatattacagcgatattcttttatcgattgatcatacatattaaatcagctccttttgattactagcatacgcctttatttaaaaatagaaacaaaaaaatagcggcattaacggccgctatttcttagtatttttgaacggtttcgattaaagcatcgactgagttgacgatcgtgccatttaatttaattaagcccaccgtataaagattgaggtaatggaattggttttcagcaatggtttgcaaagcggctaccttttgtgaattcgtggcgccttgttgccgactatctgtgtaaaggccgacaattgggatgttacgggcgtatgcgacaccaatttcactggccaccccaacatcaattgttggaccgtctaagactgcgatgaccaggtcgctagcgaccagttgttctgtatcggcttgggcaatcatttcggaattagcgtaggcttctttatcattgattgctgcgttttcttggggcaaatagatatctaaagttggtattgcttggcgtagcgttgcaacaacacgcgtattgtaatcaaaatcagcttgtgagaagagtgcatttgcaaaataaattttcataatgagcctccaatgtgtttttaccattgtatcaaattgcagacgatatgcggtacaattaatggatagtagttaactggagggaaaagtatgcgtgaaattcaagaagtacctggtaaagtgacaattaagacagcatttcgggattactttaaaggttattttgactttatgggccgaagtacgcgggcaggttattggtgggtaatgggaataataatattaatactttatataccactatttatattattaggacagttattaatcactaaaggtcatgtagctggtattaatccttggatttatttgggcatctttgcaattatcgctgtaggaatatttattccaacacttgcacttagtattcgtcgttatcgggatgctggtttaaacggtcggggcgccgttaccttatgggttttaaatggacttgcatccagctatagtcagcaatctcgcggttgggcctttatttcggctgtcatcggcttagcgttattaattacggtattattaaaaacaaatcagttagaaacagacagtgataatccgcttgtgacgttctttttgagagctaaagtgaaagaaaactaaaacaagccatcctcattttaaaggatggcttgtttgttttttgttattagattagtgctcggcggtaaacgacctttgaaagcactcaaatcataacgtgctattcatagcatactcttgtggctagcgacatcagtcaaacaaccgattgcatcggttattcgcctgattaggctagtcctcagagtataaccgctatgaatagcactcattttttatagatttctttttaatctcattgtgacgattgcttctactctggccgtttgtgggaacatgtctaatggttgaattttttcaacttggtaggtatgcaccaatgtcttaaggtctcgtgcgagtgttgaagggttacatgaaacataaacgaatttaaggggccggctgtcgagaattgcatcgattaattttggatcaagaccagtccgtggtggatcaacaacaagggctgttgggacaaagccgttatctaaccattctggtaagaggtcttcagctgcaccaacggcataatccacattgtcgatcccgttgatttctgcgttatgtttagcggcttcgattgagtcggcaattgtatccataccacgcacttcagcgacttgattggcaagacttaatccgatagtgccgacaccacagtaagcatcgactaagcgatcttcaggggttaaatcgagtgcttctttaaccaagttatacatcttagcggtttgaacaggattgagttggaaaaaggcgcgggcagttaattcaaactgaacgccgttgaggttttccataatcgtttcttgaccggcaaggtgcattgtttggtcaccccataccaagacgtttttccctttgttgacgttttgcataattgagaccacttcgggtaattcagcttgaatggcggtaattagcgcatatttctttggtagtttgggtgaattggtgataaatgttagttgtgcttcaccggttgagaaagattcacgcacgacaattgtttttaagataccggcgttcttttcttcatcaaagacggggatgccaaggtcttcaaccaattttaaaacagtgcggataatccgcattgttaaatcagtttgggttgcgaattctgggaggtcaatcaaagtatgactgcttggagcgtataacccagcccctaagtggtcacctaattgacgcacttggaattgtgctttattccggtagtgccatggattttccatgcccacggtttcagtgacttgatagccattgtaaccgtgtggtttgaatttttctaaggcttggatcatcatatcctttttaaaggcgagttggccaggataactgagatgttccaattcaatcccaccaacttgaccgtaagtggcatctctaggtgtgacccgttgtggtgattcttgacgaatcttgtggaccttagcttcgatgaagcggggggcaacagttgtgacttcggcaatcacgacttcttcaggaagtgcaccggggatgaaaacaatcttgcgtttgtaataaccaatcccttcaccgttaatcccgattcgcttgatggtcagtgggaaacgttggccgacttcgacttcattagtagttgtttgttctggcatttaattaactcctatattgttaaaattgtaaatagcacgaaatttgctgtaccctattataacagaacccggttagaaaaaacggatattctaatcggaaactaacagcgttcgattttgttgcgcgttgtgatttatgctactctatagagtgtgatgcaagtcggttatggcctgaggatataattgatgaaatgcatttaaataagaagtatgtcagtagccggggattagtattaactccccatgaaggagcgaataacgatgaacttttgggaacgaaatcaatttttaattgcgatggtgatagtccttgcaattgggatctatgcttttcaagcgaagagcttgccattaatcattggcaccctgattttagcggtagtcgtgattggctttaagatttatctgaacgtcaaagcgacacgtaacgggagaaaataagatgccacagattactaaaattacctcacaaaaacaaaaagggcgctataacatttttatcgacgagcagtttgcctttggggtgactgaaagtgtcttaatcaagtttcggcttgcaaaagggctcgaaatcgatagtagcttacaacgtgacattcaaaaagaagatgacaatgccaaggcctatcaactggccttgaattatttaagtcaccaattacgaacggaaaaagaattaacacaatacttgcgtgatcatgaaattacgccagaaggcattgaaaccagtttgacaaaattacgcgaactacattatttggatgatcaggattacgcggacagttatgttagaacggtgattaatacttcggataaggggcctaaagtggttcgacaaaaattgattcaaaaaggggttagtgctaatcatatcgatcaagcattgacgttatatacagatgaagaacaagtgacagtcggcttagcaactgcccaaaagctagcgaagaagtaccgccacagttcgttcttcgaacaacagcaaaagattaaacagggcttgatgcaaaagggctttggtggtgataatttaagtcggattattgacgaattagcgcttgaagaagacagtgatagtgaagcagatgcattggcagcccttggcgagaaaaaatggcgccgttatcgcctattagaatcgcgcgagcggcggatgaagatgcaacaagcactttaccggaaaggatttaatattgatgcaatcaaccgtttcatcgacgaccaagaagtatcagatgacaccgagtgaacgtgaggcgtttcagactgcttttatggcatggtacgacgaacatcgtcgcgatttaccttggcgtcaaaatcaagaaccttaccgggtctggttgtctgaaattatgctccaacaaacgcaagtccaaacggtgattccgtattacgaacgctttttagcgacttttccaaccgttgaagacctagcagctgccccagaagagttgctcttgaaaacttgggaagggctaggctattattcacgggcgcgtaatttacaaaaagcggctaagcaagtagttgatgactatcagggcaaatggccgcaaacatttgctgagttagaaaaattagccggtatcggcccgtatacagcaggcgccatcgccagtatctgttttggcgaagtggttcccgcaatcgacgggaatgcttttcgggtcttcagtcggttattaaaaattgacgctgatattgcgaatccgaagaatcgtagtattttttacgacgccattttaccgttaattcccaaagaccgacctggcgatttcaaccaggctgtcatggattttggttcgcaagtttgtacagccaaaaatccaacggttggggacaccgaattagcaccatttttcagaagttatcaagatggcacgttgttggattatccggttaaaacgaagaaggctaaaccaaaaccggttgcgctttttgcggttgtgattgaatctgaaaagggctttttattccaaaagcgacctagcacaggtttgctggctaatttaacgacctatcctttggtgatggcagaagatttacaggatggtgagtctgagttattaacgccagaagagcaaatgactcgaattgaagcctacttcaaagaggcgtatggtttaacattagcgcatttaaaaccggtgcctgtcaaaccggtgacgcacgtttttacccatttgaagtggacgattacgttgttatcggcgacgattgcaaaagacagcgacttggcctttttcccaggtgaatggtattcaaaagcagctctagcagaaattgcaatgccaacggttcaaaagaaaatggcgcaacgatttgactcactttagcggtagaaagttttaggtaattttgagagtctttgctataatgataggtgattatgaataataaccttggaaagccaggtaggtcgatgaatgcacctaaagaaggcgactatatagcgattcaaagttataaacacgatgggagtttacaccggacttggcgcgacacgatggttttgaaaaccagcgagaacgcagtcattggttgtaacgatcataccttagttacagaatcagacggcagaaagtgggtcacgagggagccggcacttatttatttccataagaagtattggtttaacgttgtggccatgattcgcgaaggcggcgtttcatattattgcaatttggcatcgccacacgttatggatcaagaagcgttgaagtatatcgactatgatttagacgtgaaggtctttccaaacggagagaaacgcttgttagacgtcgatgaatatgaagcgcatagtgcgaagtggcactattctgccgaaactgatcggatattgaaagccaatgtcaaagttttggtagattggatcaacaatggcaaagggccattttcgaaggaatatattgatatctggtataaccgatatcaagaattggctcaccaccgttagaacactatttagtcttaatagcaaaagaagaccgcacagattgtgcggccttctttttttgctttcttttaagaatgatattcatcaaaagtggtgtttgctctaaaaggcaccggattgttattttctaaaaagcggcttttataaaagcgatactgaggtgtataaggatgggttgaacttttatcccatggtttttctgagccacaaaaatgaatgagtcccggttctttttgcgcacttagaaattgacggttaatccgttcggtcggtgcaacgataaagtccatcaaaatgctagtttggacgttccatttggggtgtaagtgaatccaacgatcatgtaaaatcgcatttaaggcatcttggtcgtgaaatcgtaatttttgagggtattctttaatgaaggtcaaaatttgttccgttattttttgttggcgccagatggttaggttcatcaataaaacaccggcattgaagtagcgaatactcttgtagtcaattgccatttgagccaatcgattatggaagccggcatcttcaacagcggctactggtatgttacccaattcaacgtcccacagacgcgcgagattttcgaggcatagtgtatcacaatctaaatagagcacgcgttcgatctcgggtagtagattaggaatcagtaatcggtaataggcagtttttaaaacttggtcatcttgaatgaccgccgttagtggtgtttcgtcaacttcaataaaggttaattcggcattaaaactttcagtgatttggcgcaaggttgcctgatcgcgagcagttagctgatcactcaaaacaaaaaaggcataatggcggttatcatcgttattattcagaattgaggcgtataaaatcgcgaggggttccacaaaattagaattagccgcagaaacaatattgatttgatcacgtttgtcagcaggtagttgtgataaatagacctgatattcggacatataaggatgctctaaaaagacttcccatgggtttttctcagtggtgaagtgaatgattttaggagccgtaattgcctgtttaaagagttgattgtactcattattaattggctcataggttttaaataaaatggcattttgaacgttccacttgggagccaataacttagtccgtcccgccaaaacgacattcagcgcatcttggatatcattaacacggcgcccagggtaaggcactagcatcgcaagaattttttggctgatatggtgtgtttcccaaagcatggtatcgattatcaaaacgccggcattaaaatagatattattggcttgcgatttaggaacaccaagtctttttaaggtcagtgccttaccagggtcaatgaccgcaccgataatattcccctctaaatcactgtcgtataaaggcgttaaatcggttcggatgagtgtgtcgagatcaagatagagtactcgctcaatatgtctggcgaggaggatttgtggtgctagaattcgataataggcagtttggtcaaaatgattatttcctgggaaatttttgatgcgacggggattaatggcaataaatgagacatgatggggtagcgtcattaagcgattgacggcggacttagttgcgtaggagaggtcgctactcaagacaaataaatcaacagccgtttctaaagcacaatgttctcgaatcgatttaagtgtcagtaacatctgatcggcgtattgctcgtcagcagctaccataatagcaatcgttttgatggcactcatctccttcatagctatttatgattaagtgtaacaagttgccaaaaggcttgtaaaattaactgattagcgcacaaaaaaaccatcctgaagaaggatggttgggaaaattatgttcaaaaccaaagcgccttgactagcacgctaattgttttctaccgatgtgtcttgttgaattgttagtgtcttgaaaccgagggctgttgcgatgctaattgaagcaaaaattgcgataacacaccaaccgagtaagctaccagagataatttggatgggaagaaagtctcttagtagatacgttgctaggcaaaagagtacgaaatctaaaacgaagttgccaattttataagcagttgaacgactgataatgaagaagttcaaaatagcatgcataacaggattcttagtttgttcagtcataattgttagtggccgttcaagcggtacttttgtaaagagggttaggattccaccgacgagaccgccaaaaattgtacgatcccaagtagcgctatgcacaaccaaactgtcataagcgatggcagcaattgtaacaactagtaaataagggataacgaagaaaaatagattaacgaaaaatattttttgtttagacataataaacctctctttgaaaacagggtcagactttaatatttattataggttaaagattgtaagaatgccaacggtttatatgatcttaatcatttcttgatgtaaaataccagcgtctaagaaacgttccttatcagttgcttggtagcctaagcgttcataaaatgggacggctgtgacttgagcgtttaaaataaggcctttatgaccggctttttttgcggatgcttcagctgcttgcattaactctaatccaagcccttggtgccggtaagctttcattgtagcgacgcgttgcacgtgataaaagtcgccctcggtcaatacgcgtaatgtggcaacaggttgttgatctagataacctgtgaagtagagtgcttggtcttcaaattcatcgatttccatttcagcggggaccttttgttcagcgacaaaaaccgcttggcgaatagcgagaccatcttgatagtaaggacttgttaaatcacgtgtttgtttaatttgcatgaaaaaaccaccaatcgtttgaatttatgtagctttacaatgaaatttggtacaataaaaataatctttgtgtttatagtagcacaattgggcgttattttcgatgaagtcaagtggaggaatgtttatgtttgagcgtttgcgtcaatcaaaattgttgttttggtcaactgaattattaatcttggccgttttaatttttgtttgtactaaaattagtttcttatttgatccaatagggacctttatttcaaccttgtttgggccaatcattggggcagggttattattctacctatttaatccgttgattaatttactaggtaagctaaaaatatcgcgaaaatgggcaattgcgattattttcatcgtctttttcggcgggattatcttcattgtggctttagcgattccacaattaatccatcaagtgacacaagtggtaacgaatctaccagattatgtgcatcgcttgcaggacatgattgataagatctcaacaaatccgcatttgaagaatatcgatgttaataaatacgttaaccaattagacttaaaaccttctaagattgctgaaaacatcatgaagagtttcaccagcggtttcggcagcatgattggggccgtgacgagtgtgacgattggtgtctttaccgtaccaatcatgctcttttatatgttaaaagacggtcatcgactcattccaaatattcaaaagatgttaccagatcgttataacgatcaagtcgctgatttattacgtaaaatgggtgcaaccatttcagcttatatcggcggacaagcgctagaatgtttattcgtcggtgttttcacctttattggttacctgattattgggatgccatatgcctacttattgggctttatcgccggtgtttccaacattattccatatcttggtccttatattgggattgcacctgctttaattattagtttatcaatttcaattccgaaaacaatcatggtgattgtcgtagtagttattgtgcaacaaattgatgggaacttgatttaccctaatgtgattggccgttccctagatattcacccattaacgattatcattatcttgttagttgccggcaatatctacggtattttggggatgattttagcaattccgttttatgccgttaccaaaacagttgttgtttatttatacgatattcaagccttacgcactaaagtcgataaggcgactaaattataatcgcacaagactgatttgaaggcgattttaacgactcttactgggttgaatttccatttttgactatgctatactgcatagtaggtcttaatcggctcaatacgataatttataagatgaaaggtagtggatgtgacgatgaatcctgaccctggaagtccggtgtggggacagttactgttgattttaattttaaccttagtgaatgctttttttgccgcggcagaaattgcgctagtatcactaagtcgcacgaagatggagaaccaagcagaaaatggcgataagaaggcgcgcttattagtggaggttttaaaccactccaataatttcttagcaacgatccaagttgccattacgtttgctggtttcttatcttcagcgagtgctgccacaaccattgcgggtagattagcaccccttttaggaaatgcggcttggacgaaggaagcagccgtattaattgtgacgattgtcttatcctatatctcacttgtttttggggaattatatcccaaacaagttgccctgcatcgctcagaagcgattgccaaggcggcagttcaaccgattcgcttcattggcgttttattgcgaccattcgtttggttgctatcagcgtcaacgacggttttgatgaagttaacgccaattgatttttctgagacagaacccaaactaacccgtgaagagatggttcatatgatcgaatcagggaaaagtgcaggggttttagaatctgacgagtacgaaatgttagaagggattattacccttaataagaagatggccagagaggtcatggttcccagaacggacgccttcatggtggatatctgtgcggacaatgaccaaaatattgatgctattttagcacaaccattttcacgaatcccagtttatcgggatgataaagatcaaattgtagggattgtccacatcaagaatctactaagagaagcacgtgagaagggcttctcagaaacacaattggaaacagtcatgaaagaacccttgtttgtgcctgaaacaatcgtgattgatgacttattattcgaaatgaaacgtacccaactccagatggccatcttgttagatgaatatggtggcgttgttgggctagtcacaattgaagatttattagaagagattgttggcgagattgaagatgaatccgataaggcggatgtgttgtatcagaagattgacgagacccactacaaggtaatgggccggatgccaattaatgaatttaacgatgtctttcagaccgatattcaaatcgctgatgttgatacgattgctggctttatgattactgagattggtgcaattcctgtcagtggtcatccagaatcaatcgatttaccgaacggcattgttttaacaactggttcggtagtcggttcacgtttattagatttgaaactaacattaccaacgacggtcgctgcaaaagatgatgcgtctgaggcctaatgactttggcactaaagagaggatttaacaatgacaccaactgaattaaaaacggctgttgaacgccggcggacttttgcaattatttcccatccggatgctgggaaaacaacaattactgaacaactcttattattcgggggcgtgattcgtcaagccggaaccgttaaagggaagaagagtggccagtttgcgaaatctgactggatggatattgaaaagcaacgggggatttccgttacaagttctgtgatgcagttcgattacgctggcaaacggattaacatcttagatacgccagggcatgaggatttctcagaagatacttaccggacattgatggcggtggatgccgctgtcatggtaattgattccgctaaagggatcgaaccccaaactaagaaattatttaaagtctgcaagatgcgtggtattccaattttcacattcatgaataaattggatcgtgatggtcgcgaaccactcgatttaattgctgaattagaagaattattggatatcgaaggttgtgctatgaactggccaatcgggatgggtaaagatttacgtggcctatacgatattgctaacaaacgaatcgaaatgtatcgtccagaagatgaagccaatccttatcttgctttagatgaagaaggcaagattgctggcgataatcctttgaaggaagattctgtttacacacaagcactagatgacatcgaattaatcggtgaagcgggtaatgcttacgatcccgctaaaattgctactggtgatcaaacaccaatcttctttggttcagccttaacaaactttggcgttaagactttcttagaagcctttgttgatatggcaccagcaccagaagctcatcaaacacaagaagaaacacaagttgaaccaacgaatgaagatttctcagggttcatcttcaagattcaagctaacatgaatccagcccatcgtgatcgaattgcctttgtacgggtttgttcaggtgaattccaacgcgggattgacgtgacgttgacgcggactggtaagaagatgcggttgaataactcaactgaatttatggctgatgctcgtgaacaagtaacgagtgcggttgccggtgatattgtcgggttgtatgatacagggaacttccaaatcggtgatacgattcatactggtaaagaagcaatctcatttgaaaaactcccacaatttacaccagaattatttatgcgcgtcactgctaaaaacgtaatgaagcaaaaatcattccataaagggattcaacaattggttcaagaaggggccatccaattgtacaagacatacacaacaagcgactatattctaggtgctgttggtcaattacaatttgaagttttccaatatcggatgcaacatgaatataattctgaagtgattatggaaccaatcggctcacgaacagctcgttggattgatcctgaaaaattagatcaaagtatgtcatcatcacggaacttacttgtaaaagatattcacgaccaaccactcttcttatttgaaaataaatttgcagaacgctggttccaagataagtacccagaagttaaattaacagctaaattataagagcatgcattcctagtggcaaagcacgtttttaaacaatcaaaaagaggtcttctgacaaaatcgattttgtcagaagacctctttttatatagcgttgaaaaatgtttttttagtcaaatgttagtagtgattctaatagccactgcccaccttcaagttcacaccaccgactgagattgtcgagcgcaatcacttgcttgacgtgcacgcgagtcttcaaagcaaggcgataggtagccggtttttcgtaaggcgcggcccataatgttgccgttgtgttattcaaagtcgcatctaaattaagcggtgtggtttcaataaccgtatattgattggtaaacttggggacttggtaatcgaccgttgccttagggttagttgcatggagttcataatgcttgggtgaaatccaaaaactaccgaggttgaaccattgttgaccagaagtagctgttgcacaactataaattttccaaattgcattcttaggtaagcgggtcgtggtgagtgcttcttctgtcggccgtttgtaagtgtcaaccgatgcggttaattcaataaacggttgatcaggggcatcgctgtattttagattaagtggatcatattggaaccgtactagctgcgtttcagcactaaaacgtcctgtttgattactagaagtgcgatagatgaagttcacaccgccttctaacgggttagcttgatagtgttcattcaaagcgccaagtaaaaattggggtttgatcagcaaaccaccttctaaatcttgatgaagtaccatgactggtgccgctaattggggtttataaaaaagccaaatgttagtggggtcttcatggaaatgttgttttaaatttgtaatttcggctaaatagtagccaggaaattttaaccacggtaaatcaagcgtagcgccaactactccagaaagtgtaatcgaaggccgcagtggaattcgattttggttgaggtagtggatcgtcactgaacttttgcgtggttggacaggtgttgtgacaaaatgttcagtttgctgcgcttggggttctttttcaaattcatcagctgtctcgaagaattgatttgtgttttctggttcaggagtagcttgattaaagtgcgtctctggttgaatggttgggcgctttggccgccgtctaaataacgattgaatcaggttaataaaattcatacggactcctcgtggaacgttatttacttaatactagtctatcataaattagaaaaagagtggtttataatcgttactaatttggctagaattttaaataaaaagcgtgcaccttagagggcatcattatccgcttactaatttggctagcaaaaaaagggattagggcaaaaattttatttgccttaatcccttttaatcatcttttatgataaatcgagtacttgtaattgggttggttgatgcaagatacgcccaacagcaagggggacgattgagatgacgagttcgccagttcttgaaataacggcgcgttcaagatggccgccaaaaacgcttgtgtctaagcgggcaaaactggcgtgcaagtgagttgaaatcttaccatccgcattttcaacgttaccactcagtgataggagttcaacctgttcttggctgcgcgtttcaacgtagctgtcgctgtctggtgagtaaatactgacagtaacatcattgcaggcaccaattcctgagatggcacctaattggtccggtaaagtagcggctaaatatttcaattcggtgatgagttcatcgccaacttctaaacgacaaataatttgttgccctttttgaacagtttgcatcgtaaaatcctccctcaataagcttaatgggtattatacgatatgccatatcgaattgctattattttgattgcatacaaaaagccactaccaaagttatcggtagtggcctgctttcaaccgtctaagaggcggtagtagaaggggttggaatggtaatctcaactaatgagccatcgtttaggatttcaacatcgtcggttgaatcaatatctactaattccttgagtacaaaatcaatttcagcttgttgaatatgtcgcttgtcattttttagaagaatttcacgcgttttagatgagcgggtgaaaaggactgttgttttgccaagcgaatagacgctcacatagtcggctttagtggttgctaattgttgtgttactaaacggtgataagaatttgtaatattaatgagtctcatactaatcactccctaatcatttaagtcctactaatagtataactgaaagcgatttatataacacggatttaatcttaaaatatgataataaatcttaatatttgatattatccttgcacaatttgaatctgatcatcatttaactgcgcttttaattgcttatgttctggatgatctaaataataatcagcaacgcggtcttcaatttgttcttgaatgacacgacgtagtggccgagcgcccatttcagggttgtagcccaaatcgactaatttagatttagcgtcatccgtcacagcaatgtggaggccttgatcggcaatcatcgcgttagtttgatcaagcattaagctgacaatctttaatagattatctttacttaatggttggaattcaataatatcgtcgaaacgatttaagaattctggtttaaagtagttcgttaactgatcgagaattgaatgggtttggccagcgacagctgcaccgaaaccaacgttagcctcagcatcagtttgtccagcgttagacgtcatgataatgattgtgtctttgaagctgacagtccgaccttgtgaatcggttagacgaccgtcatctagaatttgtaagaacatgtgcataacgtcagggtgagccttttcgatttcatccaaaagaatcaaactataagggttccgacgaacttgttccgttaattgcccggcttcttcgtaaccaacgtagccaggaggtgaaccaatcaattttgacacactgaatttctccatgtattcactcatatcaaagcgaatcatcgcatcggtactgccaaagagttctttggcaatttgtttggctaattccgttttaccaaccccggttgggccaacaaagaggaaggagccaattggtcggccggatttattaaagccaattcgactacgacgaattgaacgagcgactttatcaactgcggtatcttgaccaatgacacgtgcttcaagatcttgcgctaagtttttaagttgagcttgttcttgcgcctttaattcgccaactggaatatgggttttttcttcgacaattttttccatatccttttcggtgattgttggttcttgggatttttcaactgaattattagctttcatttcagagagctgtgtgacttgatcacgataggtagctgctttttcgtaatcttcttgtttgagggcttcttgtttttgtgcttctgcagatttaatcttggcttctaattccttaggatccatcaaggtaatcgtcaagtttttcttagagcctgcttcatccaaaaggtcgatagccttatcaggcaaataacgatcttggatataacgactagaaagggccgctgctgctttaagcgcctcgtccgtatagtgaacgtggtgataactttcgtatttatcttgaagccctttgagaattagaacggtttcgtcaacagatggttcgttgaccgcgaccggttgaagacgacgtgcaagggctgcgtctttttcaatctgacggaattcattattagttgtggcgccaacgagttgtaattcgccacgcgcaagagctggcttcaacacgttaccagcatccatgccgccttcagcattgccggcgccaacgatttcgtgaatttcatcaataaagaggataatctgcttattttgtttgagctcagtgatcaactgttgcatccgttcttcaaattgaccgcgaataccagtcccttgtactaatgaaacgacatccaagcgaatcacttggcgatcctttaatttagcaggaatgtcgccatcggcaattttttgcgctaaaccttcgacaacggctgttttaccaacgccggcttcaccaattaagactggattattcttggtacgccgattgagaatttcgatgacgcgcgcgatttccttatcgcgaccaatcaccggatcaatttgaccacccttagcaaggttggtgaggttcacaccaaattggctgagtagactttcaccattttgaccgttgttaccgccgccattacggccaccttgtgtttgggggccttggttagcagcattgcgttcagcgtttggattgttgattgcattgaagagttcatcaagattactaaaaccaaagggatcattatattgaccactcattccttgttgctttagtgcttgataacagttttgacaaaggttaatggcttggttttgaccattgacgctagtgtagagatggattgttgctggatttttttgacaattttgacaaagcatttaatctgtcacaacctttcgcctattaaatgtaacgtcaaagtttgtttgactatctttgaccttaaataaattataatcatctctaaaaaaagttgcaagtaatcgaactcgaaaataaaactttatttgtgggtcaaaattgcgtacaattggaggcagtgacgctacttaataaatgaaaagagggtcattaaaaataattatctagacgtgataaaggagtgattcagatggcaagagattttttagcggagatggatgccttgttaaatcacgaaaaagaaaccattgtcgttgaacatgatgagtttttagactttcagaaagtatgggtcaattacgaccatcgaaaagaaattgtaggcgctgcccaacgaaatgggcaggtgatttaccgctgtgctgaaagcggtatagtgtagactaccattaattttgttagcgaaactgttgtagtatttttcaaaaaatggtaatcttaatattcgaaagggtagacaccatcagtgactacttatttcggtcaaaataaatctataattagataaaaggggatcgattaacatggaaaaacgcgattttcacgtagtagcagacacaggtatccacgcacgtccagctacattattggtacaaacagcaagcaaatttaactcagatgtcaacttagaatacaaaggtaaatctgtaaacttgaaatcaatcatgggcgttatgtcacttggtgttggccaaggcgcagacgttacaatttctgctgaaggtgctgatgaagcagacgcaatcaacgcaattgaagaaacaatgaaaaaggaaggtttatctgaataatgactaaactaacagggattgctgccagtgatggtatcgctactgcgaaagcctacatgttagtgcaacccgatttgtcattttcgaaatcaactatttcagattcagaaaaagagattaatcgtttgcataaggccttacaagattctacgagtgatctagagaccattcggaagattgctgctgaatcattaggagaagaagaagcgcaagtttttgacgctcacatgatgattttagcagacccagaatttaccggcgctatcgaaggtaaaatcaatgatgacaaggttaatgctgagcaagcgttgaaagaggtcgcggatttattcgtggccacttttgaggctatgactgataacgcatacatgcaagaacgtgctgctgacatcaaagatgttacgaagcgagttctcagtcatttattaggggtaacactccctaacccagcattaattgatgaagaagtaattgtgattgctcatgacttgacacctagtgacacagcccaattaaacggtaaattcgttaaggcttttgtaactgatgttggtggtcggacgtcacattctgccattatggcacgttctttagaaatccctgcaattgttgggactgaaacagtcacacaagatgttaaagctggcgacttattaattgtcgatggtattaatggtgatgttgttttagatcctacagatgctgatattgctgaatatgatgtgaaggcccaagcctttgctgatcaaaaggcagaatgggaaaaactaaagaatgaaaagtccgtcactaaagacggcaaaacattcacggttgctgctaatatcggaacacctaaagatttagctggtgtccttgaaaacggctctgaagcaatcggtttataccggacagaattcttatatatggattcagctgagttacctagtgaagatgaccagtttgaagcttataaaacagtcctagaaggtatggacggcaaaccagttgttgtgcggacaatggatatcggtggggataagaaattaccttacttaccactaccagaagaaatgaatccgttcttaggctaccgagcaattcggattagtttagatcgtgatgacattttcagaacacaattgcgcgccttattacgtgcttctaactatggtaagttacggatcatgttcccaatgatcgcaactgttgctgaattccgtcaagctaaagggattctcgaagatgaaaaagcaaaattaattgctgcaggtcaaactgtatctgacgatttacaagttgggatgatggttgaaattccagccagcgccgtattggctaaccaatttgctaaagaagttgatttcttcagtatcgggacgaacgacttgattcaatacgcaatggctgctgatcggatgaacgaacgtgtttcatacctttaccaaccttataatccagcaatcttacgtcttattaagaacgtcattgacgcttctcataaagaaggtaagtggactggtatgtgtggggaagctgccggagattcaatcatggcaccactccttgtcgggatgggcttagatgaattctcaatgagcgcaacttctgtgttacgagttcgtagtttgatgaaacgtttagacacaactgaattaactgatttagttgaaacagctgttaacgtcaatacaagcaacgaagaaaatcaaaaattagtcgaagattttatgaaagatcgttaggcttaaactttttaaagggtgttaagacaaaattacttttgtcttaacacccttttttgatagccaaaagtattaatgattgacagaagtgtttctggattgtaaactgaactcatgattacaaatgtaaacgaaaggatgtgaacgagatggcagaaaatacaaatgaaattacgacttccgaatgggaagtgatgcgcattgtctggtcacttgggcaagtcaatagtcgtgatttaattgatttacttcaacaaaagcgtgattggcaagattcaactatcaaaacattgattggccgtttggttaaaaagggcttcttaaagacagaaaaggaagggcgacgttttaattacacggcaaccgttcctgaaattgaagcgatggacaatgcgacgcagagcctttttgaacacttgtgtggtatgaaaaaagggcagacgttagccgctctaattgatcaaacgactttgagtcagacggatattttacaattacaagaactactaacagccaaagcagctactgcaccagaaaaagtggcttgcgactgtttgccaaataaatgtgactgtgaaaaggaggaatagcgatgaaacacgatgatatggagatgcacgatcatgagatgggggaaatggacatgcacgatatgcatgatatggaccatgatcacggtgatatgatgatgcatggtggacatatgatgcacatgggtaatttgaaacagaaattctgggtctcattagtcgcaacaattccgattattatattatcgccttttatggggattaaattaccgtttcaaaccacgttcccaggatcggattggttagtcctcttattagcaaccttcctattcttttacggcggtgcgcctttcttaaaaggtgcaaagggcgaattggccgagaagaacccagcgatgatgacgttgattgcgatggggattacggtatcgtacggttatagtttatatgcttttattgccaaccatttcttggcaacacaaacgcacgtgatggatttcttctgggaactggcaacgttaatcgttatcatgttgttaggtcactggattgaaatgaacgccgttatgagcgctgggagtgcgatggagaagatggccgccttattacccggccaagcacaagtgctcgatcaagatggtcagcaacacgctgttgatttgaaggatttacaagaaggccaaaccgtgttggtggcagcaggcgaaaaagtcccagcggatggtcttgtggtgaatggtcaaagtcaggtgaacgaatcattggtgactggtgaagccaaagcagttgctaaaaagactggcgaccaagtaattggtggaacagtcaatggcgacgggacattaaccgttaaagtcaaggggactggtgagagtggttatttagcgcaggtgatgaagttaatcaaacaagcacaacaagaaaagtcaaaggtcgaagggttggccgataaggtcgctaaataccttttctacgcagcattagtggctggtattattgcttttatcagttggtttttcttagctgatttaaatactgcatttgaacgaatggtgacggtcttcattatcgcttgtccgcatgcacttggtttagcgattccattagttgttgctcgaagtacagcgattgcggcaactaacggcttattaattcgtaatcgccaagcaattgaagtggcagatcaaattacgatggttttaatggataaaacagggacattgacgcaaggggcttttaaggtcaatgcggttcaaccaactggcgagatgtcaaaaactcaattgatggcttatatgggtgctttggaacgacactcaagtcatccattggcaactgggattttagcttataatgacgctgaaaaaattacgatgtcccaagctgaaaatgtacaaacgattcaaggaatcgggctgacaggcgcaattgaagggcaaacttatcaaatcgttacggccgattatctacaagaaaagcaaatcgcatttgatacggcagcctttgaaactttggcggctaaaggtaattccattagttatctaattcaaggtcaaactgtcttaggattggtcgcgcaaggggatcagttgaaaccagaagcactgacgttcatcaaggcattgaaaaagcgtcatatccaaccggtgatgttgactggggataatcaacaggttgccgaaaaggtggcgcaacaattgggtggtatgacagttcaagccaatttgaagccagaagataaggaagcacttgtacaagattaccaagcaaagggtgaagtggtcttgatggttggcgatggtgtcaacgatgcccctagcttgacgcgagctgatattgggattgcgattggtgcgggcacggatgtcgcaattgattccgcagatgtgattttggttaagagtaatccgaacgatatcatgcatttcttgaatttagcacatgctactagtcggaagatgacgcaaaacctttggtggggagctggttacaacattttagcaattccattggcgggtggcttatttgccgcttggggcttaattttaagtccagcgattggtgccatcttgatgtcgctttcaacaattgtcgtggcaattaatgcgatgacattaaaattaaaaaattaagcaaacttgtcaatccttttttgaacctcgtcaggctaatcctgataagggcgcgggaaagaaaaaattgtgcacaattggcgtatacgacatacagttggtatacgccttttttaatgtctaatacactatatatagttgcttggcatcttgaattcgtctatgatggggatagtgatttttttaaggagactggtgcaatgttggaaatacgtgaagaacaagacccaaaaatggatttagagattaaagtcgtcaaacgtgacggacgtattttacccttttcagcggataaaattgaacaagcagtcattaaagctgctaaaaacgttaaggatgaattagaaccacttgattatcaaattttaaattcagtggcaaccgacgtcgtgagcgaagtcggtgcgcggtttgataaagacgttaaaatctatgaaattcaaaatattgttgaacacaaactattagaacatcatcaatatgacatcgcccaggaatatattaattatcggacacaacgggattttgcccgcaataaagcaactgatattaactttacgattcaaaaattattggctaaggatcaaaccgtagtcaatgaaaatgccaataaggatagccaagtgtttaacacacaacgggacttaacggccggcaccgtcgctaaggcaatgggccttaagatgttgccacctaaggttgccaatgcgcatctaaaaggtgaaattcactggcacgatttggattaccaaccatacagtccaatgacgaactgttgtttaatcgattttaaagaaatgttgaatcatggctttaagattgggaacgccgaagttgaagcaccacattcaattcaaacagctacggcacaaatgtcacaaatcattgccaacgttgcttctagccaatatggtggctgttcagctgatcgagttgatgaattattggcaccttttgcacagaagaactacgacaagcatttaacggatgctaaaaactggattgatggcgaagccaaacaaacagcttacgcacaaactaagactgaaaaagatatttatgatgcgatgcaagcattggaatatgaaatcaatactttatattcatcacaaggccaaacaccattcacgacacttggctttggtttagggacaagttggatggaacgtgccattcaaaaagcaatcttagaaattagaattgaaggtttaggtaaggaaaagagaacggctattttccctaaactcgtttttgctgttaaacgtggtttaaacttagccccaactgatccaaactatgatattaaacaactagctgttgaatgtgcaactaagcggatgtaccctgacgttttaatgtatgacaagttagttgaattaacaggttcatttaaggcgccaatgggttgtcggagtttcttacaaggctggaaaaacgaacaaggacaagatgtcaacagtggccgtatgaacttgggtgttgtaacagttaacttgccacggattgcgcttgaagctgctggcgaccaagctaagttctgggaaattttagaacaacgcttgaaggtctgcaaggaagccctcgtcttcaaagtggaacgtgctaaggaagctaaacctgaaaacgccccaattctttatcgttacggtgcttttggcaaacgcttgaagaaaacggacagtgttgatgaagtcttcaagaattcacgcgcaacagtttcattgggctatattggcctctatgaagtcggtgcagccttcttcggcccagattgggaaaaggatgcaactgctaagcaattcacgttagacgtggttaaggacctctataaccattgtgttgattgggaaaaagaatatggttatcatttctcagtttatagcacacctgctgaaagtttaacgaatactttctgtcaaaaagacacgcaaaaatttgggattgtcgaaaacattacggacaaggaatactacacaaatagtttccattatgatgttcgcaaggcgccaaccccatttgaaaagttagacttcgaaaaagattatcctaaatattgtgccggtggctttattcactattgtgaatatccaaatctacgtcaaaatcctaaggcactagaagctgtttgggattacgcttatgaccgtgttggctatttaggcaccaatacgccaattgatcaatgtttcaagtgtggctttaagggtgactttaaaccaactgaacggggcttccaatgcccacaatgtgggaacacagatccagcaacgtgtgacgttgttaaacggacttgtggttatttaggtaacccacaacaacggccaatggttcacggtcgtcataaggaaatttcaagtcgtgtcaaacacatgcacatcacgattggtaatgataataataacgttgcaagacaataaacgattttgagttgaggagtttgttcaatgggaaatacgaaacgcgggcctaagaacccggcaccacaagaatggttgtctgaagaacttagtcaggattatattgcggattacaaaccatttaattttgttgatggtgaaggtgtccgttgtagtttgtatgttagtggctgtttatttgcctgcccaggttgttacaaccgaattgcacagaattttaaatatggccggccttacaccaaagaactggaggaccaaatcattgatgatcttggccaaccgtatgttcaaggtttgacgttactggggggcgaacctttcttaaataccaaaacgtgcctgtcattggttgatcgcatccatgaaacctacggacagactaaggacgtttggtcgtggacgggttatacttgggaagaattaatgctcgagtcacccgataaactggaattgttatcgcaaatcgatattctagtggacggtcgctttatgcaagataagatggatttaaccttacaatttagaggaagcagtaaccaacgtattatcgatgtaccgaaatcattggttgctggtaagcccgttatttgggataaattagtccgttaacgatgcatcactaataaaaaaataacattttattttaagagaatggtatataccgtataaattaaaaaagaagcatcaactcaggatttaagtgagttggtgcttcttttggttattagtgaaaaccttcctaatttaagctttttagtatggctatcatttgacaacgcttacataagccgttatgataatacttgtaatagcaattatataggcttttaaataacaggacagggagtgagatttatggattcatttatcagtttcatggagaaacgattcttaccaggtgctgctaaagttgggaaccaaagacatctaattgccattcgggatgcctttgtgacaacaatgccgttgatgattttaggtgcttttgcgaccttactcaataacttaccaattccggcatataccaattttatgaatagtgttttctcaaagacagttggtaccggcgcggacaaagcttacatttggactaaatttggggggaacgcttggagcgggacatttgctattttgtctgtcttcatcgttttcctagttgcctataacttaggtaagtcttacgatgttaatccgctagcatcaggcgtcacagcattaggttctttctttgctgttggtggcttggctggcatggattcaatgggcttattcgtggccttaattgtcgcaatgatttcaactgaaatcctcagacgcttattaggtaacaaacacttggttatcaagatgcctgatggggtaccacctgcagttgctaaatcatttgctgctttattaccatcaatgattaccatttctatttttgcattattcgcaacaattttattaggttttggtattgaaaatatcgtgacatcattctacaaagccgttcaagaaccattccaagggcttgcaaacagctatccttcagctttattattagcattcattacaccattcttatggttcttcgggttacacggtgccaacatgatcgaaccattcatgcaaactatcaatgcacctgctattacagctaacatcacagcgattaaagctggtaaagtagccccttacatcgttaacaaaccattctttgattcatttgttaacttgggtggtacaggcgcaacattaggtttgattttcgctatctggttagttggccgtaagaacaaacaatacatggttgttggtaacttaagtgccgcacctggcgttttcaatatcaacgaaccattaactttcggcttaccaattgtattaaatccaattctattcattccatatattgtgacaccaatggtcttagtgacaattgcttactttgcaacgagcacagggttagtgccagcagcaaccatcatgccaccttgggtaacaccaccaattatcggcgggattatggcaactgttagttggcaaggcggggttttagccgcagttaacttactcgtttcaacgattatctacttgccatttatcaagattgccacatcaatggcattaaaagaagaagcagcccgtgaacaacaagaagctgcctaataaaaaaggaagacgcttagcgtcttcctttttttagtttgtaactgatttattttccgtaatttgaccggcagtaacatccgtcaaatagttgatactaacgctcataccgatgattggagcatccgctttagtggtgattgttgaagcaacctcgccaggatatttagcatccatttgcttgaaaatcgtgatactttgttgcggtaactctttttcagagacttggtcgcttgttttttggtagtcggtcgcaagaccttcgccaatacgaactaatttttgattgttaacaaagaggtagaggtacccaatactatcgccactggcaactgatttaccagtgagttggtagccagctttggctgcagaactttgctgatcggtgaacatcgcgctttttctaagggtggcggccgattcggaagccagcgattgaattgcggagcgttcataactgtcatagctttgttgatagaggtagccgtctttgatgagtactttgccgctatcgttagcactggccgttgtgccggctgcagtccaagtaccatttaactgcgttaaggggacttgcgttgttttttgttgggttgcggtactattgaagacttcaccacgttctagggtttgggtgtgatcagtcgtaatgtattcgatattaatagtgtataggtggtcgtctttggcaatgaccgcttcaggaagaaccatcgttttagtctttgtttctagataaatcagatcatttaaactaccgattttgaaattggcatctaattttttgagtgtctggttaatttgagtgaccgacataaagtgaagatcatcttgaccttctttagtaacgctttgtcgtgttttccgagaccagtttttaaacgatacttgattgtagaccactgtattaccagaaatttgaccttggccggttgtccagttaatttgggcatcgcttctggtggtcggtgagatggttaattgctcagacacacctttggttgtttgttgtgaaccaacccttttgccgaaggtccaagtttgagtggcaccttggatgattttttctgtggttggtttgacgttagtgatggttgcttctttcgtacttttggttgattgggtcgtttttttagcttgaacaccacagccggtaagcaagagtagtgaagcgagggttaaggtgattgttttgcgcatgtgttggttcctttcgctggttaatgtgcttattataacagttgcatgagtcagtgaataaaaaaatcggctagtaccaccttcaaaaaggggaactagccggttatatttatctaaaatgattttctttgcccatcaaacgttcaccgtctggatcattatagtaacttaaaaagggaaagagtaatttgaaagtcgcaccatttccgggcgttgagctggcataaagttcgtggccaagcttgttacttagcgatttagcgagatagaggcctaggccagttgagcgctgattggattgacgcccattttgcccagtgaagcctttatcgaagacgcgcggtaaatcttcagcgggaataccggtaccagaatcgctgacactgagccagacaccctgttcatcatgcgccaaatcaattgtaatttgcccgttttgaggcgtgtatttcaaagcattggagacgatttgattcaggatgaagactaaccattttgcatctgtcagtacggtttgctcctcaccagttaatttgaattgaatccggttttggataaaatagtttcgattttgacgaatcgtttggttgatgaggggtttcaaagcatattcttggaccaagtagtctttagagaaactatcaagacgagaataatagagaacttgttcgacgtagtgttcgatttgtacgagctcgtcggtcagttgattaaatttctcctctgggatttgatcttcaatcgattcaaccaacaattgcgttgcagcaagtggcactttgctttcatgaacccagccgtcaatgaagtctttttgatcttgttgagcgtgcatcaaacgttcgatgctttgttgatgatagtctaatagcgaattaacgtatttttgaaagtactgtttttcagccgaagtagcgccggttagtggccaattgagggcatcttctttagcgttgaggcggatttgaattgttcgaaaccatttacgatggtagaggtaaagaccaatcaagaaggcgcaaaagaaaatcgttaataggaaatcgaggtacatcaaggtttctttggccaggcgcatatggggatctagccataagacgatgtctaagacaaacatgccaccaaagaagaatacgatgtgaaatagatgatcacgaataaattttttaaaggtcataattactccttatgggatgatgtagccttggccgattttagtttgaatatagtcttctagaccggcttgttcgatttttttacgcagccgattgatattgacggttaatgtattgtcatcgacaaaacgttcgtcgtcccataacgcccgtaggagtttttcacgactgacaatttgaccgtgttggcgcatcaaaaattggagtaacttatattcatttttagagaggtcaacgacagtatcaccaacttgagccccaccactttgtaagttaattagaaggccgttatgttcgatgacgtctgtattttgatcgacatagttataggtccggcgtaaaagcgcattgattttagcgattaagacttccattgaaaagggcttgttaacaaaatcatcgccacccatgttcattgacatcaccatatccatattagtactgcggctagagatgaagataattggcactttagacacttcacgaattttacgacaccaatagaaaccgtcatagacgggtaaattgatatctagtaggactaagtggggtttatccgttaaaaaacggtcaaaaatggtatcgaaatcatcgtggataatggcttttaactgccatttctctaagttctcagcaatcaagttagcaattgtaggatcatcttcaacaatcataatttcaaacataataagcgctcctcagacataattaagttcatagtaccgatttttaagttaaaagacaaccaactaaggtctgattaaatgggttttttggtaaaactctgctaaaatgtaaagcaagttaattcgggagtgtgacaaaatgacagtggtagccgttcaacaagtttctaaagtttatggccatcggtttaatctggtgaatgcgttaaataatatttcctttgagatcgaagaaggcgaatttgtcggtatcatgggaccttctggtgctggtaaaacgacgcttttaaatatgattgcgacgattgatcggccaacacatgggcaagtaatgatcaaaaatcaagttgtgacgaaaatgcgtgaggctaagttagccaattttagacgacatgatttaggctttatttttcaggactttaatttattggattcgctgacagttagggaaaatattttgttaccgttagcgttagataagatgagcgtcgccttaatcgaaaagcgactcgcccaagtgacacaagttctcgggattgggggcctattagaccgctatccagatgaaatctcaatcgggcaacggcaacgggtcgcgtgtggtcgggcgatgattaccaatcctactttattgttggctgatgaaccaacagggagcttggattcaaaatcggcaaccgaacttttgcggtatctaacggaaattaatcatcaggagaagacgacgattctattagtaacgcatgatgcgtttacggcaagttattgccggcggattctcttcatcaaggacggtcagttattttctgagattgtccgcagtggcgatcgacaacagttctttaatcaaatcattgatatgcaggcgacaattggtgggggaggtcgctacaatgctgttacgactcctcgttagaagtaccattaatcgggcccgcgattacgcggcgtacttgatggcctgtattatggcgattgttgtttacttttgttttacggctatcaaaactgatccggtgttgtctaaactaaaatcggcgggtgaacgcttaatttttggtgggacgattcaaattgccagcatcattatcattttatttgcggcctttttcctagcgtatgccaatctattctttatgaagaaacggcgacaggaaatcggaatgctaagtgtgatgggtgttacgcgtctgcagattagtgtggtatttttcgccgaaagtttagtaatcggaacgattgcactgttgattggtctgtttttcggaatctttttatcaaagttatttgggatgttgctattacggatgatgggcatcagtgtcgcaatcccgtttttaatctcctggggagctattaagcagacgacgattactttcggtttgctgttcttattaactggcctattaaatagtagtttaatttttcgctatcaactggtcgatttattacaccctaccgaatttagccgcaaaatacggcgccctaattggttaacaaccatctggggaataattggcattgttttgattatcagtggttattatttagcggaacgtattttagtgctgatgcccgaacttgaacggcgttatggctatggtattgatgcggggtatttgggtgccattttgtggtttgaagtcatcgggacacttgcctttttccaagcgtatacgcagatttggctccgaattgaacgccattggaaacgactctattatcggggcacacatttattgagtgtgacgaatctgagctatcggtttaagaaaaatgcgaaaacattgtggatgattaccattctaagcgctgtgacgattacagcgttggggagcgcagcgatgatctatacatttagccaaaagacattgcgtgaaaatattcccgcagatattatttattctaaatatcaaaaaaaaggtgtcgaacaaattttacgggcgcatcaggttacaccgaaaaaaatcacagagactacctataaaattgtcgatgcccaatttgaactggcaacgcccttgttaagtgattcaatgacgcttgctggtgctactggcgttttaccattatcgcgatataatgcgttgatggctcgacaatttaagcttccagcaacgccattacggcctaatgaggcgattgcgatgattgatttaccgctaacgatgattaagatgccacatcataaacggttagcgcatgccaatcaacaaggaattcctctgcagattaagcaaccggagttaccacagctccgcattattcatcttcggcggttatttccaaatggcgtatcggttaatttttacggctcactgaatatggttgctgtgccagatcaatattacgatcaaatcaagccggctactattgaccatgtctatgcgcttgatctaacgcctaagcaacgacgcgataaaaaactgatgaagtcgttttttaagctttcacaagatacgaaaaagcggagctatctaacagctgttagaaatgaaaatggctttaaacgctatcgagtgacgactaaagaagaacgaagtggttttgtccgtgctgatttattattacgcaagcctaatcaggaccgtgcgaatgccaactttggtttttatatgtatatcgccttatttatcgcattgacgtttatgttggcgactgggagtatcattatgttgaaacaattatcggaagcccaagaggaaattttacagtataaaaccttaaaacgaattggcatgacttattcggaaatcaaacgcacgatttatttccaaattctgattatctttttattgccgattattctggggaccttgcacgcgatttttgcgattcgattattgagtttgtttttggataatcctgggttacaattagtctatattgtgtgcggcattttcattatgatttattttgtgttctatctggtaactgccgaaatctacaatcgcatcgtcaatataccgttaaatgacgatgcactatattaagctcggaggaaaaatttttgcaattaagaacttatcgtgcaactgcgcggcaactattaaaaggccactggcagatgatggcaaccttagtgatcatctggctattagtcgaaatggggaccgatacgctggtgcaaagcttattcgagacaaattcatttggttatcaaatgttaaatacgtttgccaactatttattttattttgtctttttaaacgctgttttcttagcggcgtataaattaacactcaaaaaagaaacgcgtctcagcgatacattagtattgttccgaccaccgttttatacgcatctgattatcttaaacttcattcaacaattattaaattgggcattaacatttattggtttagcaccatttcaccagttaatcagctggcaacgggttttccgttatacgtataatggcatcacatcaatggcaccttatattatgcagattagtcagaatccaaaacaatatacgactgttttggcattcttgttggtgattctagcaatcaccttcttgcaaccattaattttgatgtactatcaaatcttagtgttgatcaaatttgattttccacaggtttcaatgcggatgctactatccttgtcagtactcatcttaaaagggcactggttgaaattattaggattagggttatcattcattggctgggaattgttagtctacttgacggccggcatcggtttcatctggttctatccatatttaatcgtcagtgtgacggccttttaccaagatattaagcaacaacgcattcaaattattcaatagtaaagaaggattggctaacatgccaatccttttttgatgcttaaaaaacgctaaatatttaaaaacaagggtgcaatataattggctagtgagctactatagaggaagatagaaaggtggttcattaaaatggaattaacagttttaggttattatggcggttatccatacgcgggggtcggcacaagtagttatctcttaacgagtggcgattatcatttattactcgattgcgggagcggcgcactcttggcactcgaaaaagaacttgatccactccaattagatgccgtcttgttgacgcattatcaccatgatcacatcgcagatgtcggcgttttacaatattactggcaactacaagcaggtcaaaagaaagaacccatattgccaatttatgggcatttacaagatccattgcactttggtagcctaaccctaccaaatgtaacgcaaggttttggttatcaagaagatactacgttgcaactcggaccattgaaagtcacgtttaagcggactgagcatccagtaccagcctttgccgttcgaattgaagaagaaacaaccggcaaggttttagtctttacagcagatactgcctacttcccagggttagctgagttctgtcagggtgctgatttattgatgactgacactaacttcttggctgatcgtacagggaagatggcgcacatgacgacgacgcaatcagcgaaccttgcacagattagcggcgttaaacaattattgctaacgcatttaccacaagctgtcacaccagagactttattggcacaagctaaaacagtgataacgacaattccagtcacaattgccgaacagggtttgacaattaaaatagactaggttagaataggtcttgttgttagcttacaaaaaataagttaaatatcatgagaacgatacgctggtataattttttttaaatggtaaggataaccttttaaaagggacaataagttcaatgtgtgatatgagtggattgaaacgcttttattgaacataacgaaactattagtctaatagaaaagattaatatttaattagaaattaaggaaattaactagcttttgctggttgtttcgtgtataataagttcttgtaagagagagaatgaggcggagatgggttatttcatagccgctctcataaaaggtaaaggagagagacatatggttacattatatacttcaccaagttgtacatcttgtcgtaaagctcgtgcgtggttaaaggaacataacattccatttaaagaacgcaatattttttcggagcctctcaataaaaatgaaattaaaaccattttgcgaatgactgaggacggcactgaagaaattatttcaacacgttctaagattttccaacaactaaatattaaaattgatgatttatctgttaatgaattattagatcttgttcaagaaaatcctggtctattaagacgaccaattatcttggatgaaaaacgacttcaagttggttacaacgaagatgaaattcgtcgtttcttaccacgcgaagtgcgcgcactagaattacaacaagcacaattaatggcaggattctaaaaaaagtcgaggtggatacctcgacttttttagtagcaaacgaaattattatctttttttgaatggaaatggtttgatacttgaatgttgtgtccgatactggtatggtaaagcaaagagtaggatactgtgcaggctatttaaatagcccaatagaaaggggcgttgtcccatgagaatggaaaaaatcgatgaaaacacaattcgtgttttattggaaaatgatgatctagaagaacgtggcattactggtcttgatttattgagtaatcataaaaaaatcgagcgcttcttctattcaattctagaagaagttgatcaagatcacgttttcgctaataatgatgcggtcactttccaagtattacctaatgaacaggggttagagttattaattagtaagaatttatctaatcttgatttgaacaaagcacaatcagaaatggttcagggaaaagacggtattacagagtatattaaggatcaactattgaagcgggatacggcctcttctgaggatgacgaagaagaagacgaaatcgaatcttatttaaatcaagcggataacccaactaaacaagttgttttaggctttgatacatttgaagattggattgcacttgcccaacagttgcacattgaaagtggtgtttcgaacctttttgtttacaaacatcaatattacgcgcaattagtgttcttcttagaaaatacgacggaaacgtttgtccaagatgatttagcggtcgctaatgaatttggtcataaaacaaattacactgctgatttcttaagtgaatatggtcagagagtaatggaaaatagcgccttggaattaacacgttactattttaaagattaattaaaaagccagttgatgaataatcaactggcttttttgcgtattttttcttggggtgttttgatgaaaatggctttgaatcttgctggtcagttggtgtctgctggagatgccgtcttactcggaagtggtcagtatttttgcccgcggtgccaaaagtctgttcaactcaaaggcggtcagcagactgttccttattttgcacatcaaactaaagcggtgggtggcggtggtgaaagtggtgcccatcaagctggtaaggtggcgattgcagcacttgctaatgcgctggggtggcaggcagattttgagttggttgttaatcctgagcagagggccgatgtttatttaacaaagcccaattgtgagtcacaagtgattgagtatcaatgtagtccgttgacacccacacaattgttaaaacgaacgcaggggtatcatgcaagtggtttggcagtcacttggatagttggtgatcggttccgttttaaatcccgtcatcttagtcggcaacaattggcttttttaaattattgcccggcatggggcttttatctattttgttacagcacgcaattgcaccgttgggtcttgcaacatcacgtcgttgcgcttgaatttcaaggttatcagtggcggacacaatactttaaaccgcgtcaactagtcgcatttttaagtaaaaatcgtttgttaaaaccaatcaatattcaaaatatgccgattgattggcaacgagcgcggctgatgcaacgactaaagctatgtgatgagcgttttgtccgcttgcaacagttttgttaccaacaaggaacgttactccaaaaagcccctgattggtgtttttatcaatcggtagtgccaccactttatcagcagaatcagtttgaaagtcgcttaaagtggtggctggctgagcaacccgtaaccacattttcgcagttttgtcccaccttaaatcaaccgttaattggccaacaagcttttcgagattggccaacctgcaggctacaacaggctttgcgggctaaaaaataagcgtccaagactgtttaaaatcttgagcgcttatttagtgctgaatgacggattacgacagtacgcgaaaggcgattttagtcacattagctttatgtttttgtaatttttggtacgtgtcttcaggactcactccctgagaacaaacctctttcaagaggtcgtaagaatcacaattttcaattaataagccggcttcagagtcatctttagaatagtcaaaggcaactgcggaaggtgtcatcttaatgttcatttcacaggctagttgttgatcggaatcaaaaacctgtttagttaaatcgctgtgccaatcttcgagtaacatttcagtatctaagtgggccttttcagcgatttctaaaactaatttagtatcaagggtagtatcaggttgttgaaaaacttgttggagctgcattaaaaatgcttggctcttcttacttccttggaaagtcgctgctttataagctaagactgcttcgtacatcgtactgaagacgtggtttcttaagtctaagtcacgtcggtttaaattttgaaattgcatgtaacgttcaacgttttgtaagttgaggacgggtatgaacttgaaatggatgttcatatcagcctcgtcaataatttttaaaagtgccttttcggattgcaagcaacgttggccgatcgggttaatatataaaaacacttctaacaaaatggttcccccaaacttaagtctcgtattgaaagctcttgtcttactttaacaaatttttttggatttgcaattagttagctttgatgatttttagcacgttgaatcttgttgagtggtgtcgtttgtgttaatttaaaacgcgaaacgatgccttggaagaaaggttgggcgagtgtcgcgtcgtcaaattccagttctaattcatagtcagctgtctgatccgggtaggttgtttgatctaatgtcaagcgaccactaggcagtgttaaaacttgccgattggtagtcgcttgtccccagatgaaaagggctgaccaatcaattccgattgcttctaggtacttagcaatttgctgattgggctgaatggtttgttgcgcaatcaattgctgtgcagtggctaacggcattgtatcggtgatttccagtagggtgcgtgtcgcaccagtctggggtacttttaaggtctgttctgcctgttcttggtagaggcgagtgcgcaaccccatatgttgctgatacaaaccattttgcggtagctcgtagtaataattggtctgggtaaaaggtgtcggccatgaataggcggcccgcagttgattgaattgttgttcagtgagactgactttaaattcacgttcaatggtctgtgtcatttaataacctgccttttgagaataagactatcctagcataaatttgaaaacttgtaattgtatttgatttgggaggaattctatctattcttttccaatatatgttaaaataatgctgtatgtgacagattgaatgaggggttattatggtcgaaaattggaaaaaattcctgatgccttatgaacaagccgttagtgaattgaaaataaaattacgtggtatgcgtaaacaatatcaacaaaataatgaacatgccccaatcgaatttgtaacgggccgggtcaaaccgatagatagtatcaaagaaaaaatgcagcgacggtatatcacagaggatttattggaacaagatatgcaagatatcgctgggttacggattatgtgtcagttcgtagaagatatccacgaaattgtgggcttattacaccaacgaaccgatatgaagattatcgaggaacgcgactacgtttcaaacgttaaacccagtggttatcgctcatatcacattgtggttgaatacccagtgcaactgatcagcggtgaaaaattaatcttggcagaaattcagattcggacaatgtcgatgaatttttgggcaacgattgaacattcactcaattataaataccaaggggaattccctgaaacattgaaggcacgtttaaaacgggcagccgaagcgtcatttatgttagataaagaaatgtctgaaattcgcgaagaaattcaagaagcacaacagctcttttcatacggtaagtggcagagtgctttagaaaaggcgactgaaaacgattctgaaggagatgccccagattgagaataacggtatatagcaatgacggcagctcttctcgacaagtggctgataaactaaccaataagttaattaacaacggttttacgatggacgcacaaacaccagaagtggtgatttcagttggtggcgatgggacgttactatctgcttttcaccgctatgctgatgcgctagatcaaatccgctttatcggggttcatacagggcacctgggcttttatacggattggcgggattttgaagttgatgatttagtagtcgctttacaagaagatttgggtcagagtattagttatccgttactcgaggttaagattacctatgccgataccaatgaagtgcaacacttcttggcgttgaacgaagtgacgttgcggcgttatgcggcaaccttgcggaccgatgtttatatcaaagaaaacttttttgaaagtttccgtggtgatggcctatgtgtttcgacaccaactggctcaacggcttacggaaaatcaattggtggggcggtcttgcatccacgcttagaagcaatgcaattgactgaaattgcgtcgattaataatcgtgtttaccgaacactggccgcaccaattgtgttgccttctgatgaatggttacttttaaaaccttcacgcaccagcgattacgttgtgacgattgatcagtttacgtttaaggatcgaccaattgaatcaatgcaatttaaaattgcaaaagaaagaatacaatttgcacgttaccgacacacccatttctgggatcgcgtcgaagatgcatttattgggtcaaaacatgaaatttgagtggcaatacacagacagcgaaggctgtattttacgcaattttttaagacgacatgagatttctcggagtcagctatcgaagattaaattctcaggtgggcatattttagtgaacggtcaggaagctcataccaatattagactagttcaaaatgatgtggtgacggtttatctagcgccagaagtagcggtggaacacgtgatccctgtgaagggtgatttaaaaattgcctatgaggatgatcattttctgattgttgataaaccggcctttgtcgcttcgctaccggctcccaaccatccgaataatacgatggccaactttgtgaagcagtatttgattgatgaacaagctgaaagtcttgcagttcatgttgtcacgcgtttggaccgtgatacgagcggcttgatgatgttcactaagcatggttttgcgcatagtttgttggatcgacagttacagtcgaaagaattacaaaaaacgtatatcgcaattgctagtggtgatatgcgcgaggatttaccgcaacatgcgtggattgatcgtccgattaaacgctcggaagaattctacatgcggcgggtagtcggcgaaggtggtaagcgctcattgaccgaatattggcaagccgctcacggtgatggcgccacactcgttaaattgaagttactaacaggccggacacatcagattcgggtccattttgcatcgttagggcattcactaattggtgataacctctacggtgaatctgatgatttattgccgcgccaagcacttcattgccgccaattgacgttttatcatccatttgaagaacgaacaattacggtgaaaagcccggtgccagctgattttagcgccgttttagcgcaacgtcagtttgattttgatgaaacaacactctaaaaataagcaaaaggccgtgatttagcggtctttttttgtgtttaattttaataaaaaaaccttaaacttctaatttaagtcgcattctagatttgaaattagtatactagagaacgactacgtttcatggagggatggagagtgtgttaactttaaatgtgattaaggcaattattttagggattgtcgaaggttttacggaatggttaccgattagttcaacgggccatttagtcttagtaggtagtgttttaaaaatgggcgaatcaaaagcctttatggatatgtttaactacgtcattcaattcggtgcgattttggccgttgtcgtcttgtacttccataaattgaacccattttcaccgcagaagaatcaattagagcaaaaacaaacatggactttatggtttaaggttattttggcggttattccgtcagtgattattggtttcccattgaatgattggatggatgaacatttaatgcaaaactgggttgtcgcaagtatgttaattttatatggtattttatttatcgttattgaaaaccgcaataaacaacgcacacccaaatttgcagatttaaatacgttaccttggttaaccgccttttggattggctgtttccaagccttatcaattattcctgggacatcacgttcaggggcaacgattttaggggcgattttaattgggacatcacgttttgttggggctgaattctcattcttcatggcaattccaacgatgattggggtcagcatcttgaagattgggaagttcttctaccaaggcaatacctttactggtgatcaatcaattattttattggtcgggatggtcgtctcattcatcatttcaatcatttcaatcaagttcttgatgggttatatcaagaaaaacgacttcaaggttttcggttggtatcggattatcctaggggtattggtattaggcgcaatgttcttataagagtgcgtttaaaacgggtatattcagagcattaacctgatttgacggatagaactaggcacagaaagttgctaattaaaagcaggtttggatatgagtgcttttgggtgcgcttagcaactgagcattaattaaaaatttctattaatccagattttaggattaatagaaattttagattgagcggaagttgttgcaacccaaaaagcacgtttaaaataaaaattggaggttttcccatgttaatcaaagaagtttgtgtcgaaaatttcaccgaaattccggctgccattcgtaatggtgccaaacgaattgaattaaacgacaacttagcggttggcggcaccactgttagtcgtggtgttatggctgaatcagtacgttatgcacatgaacatgatgtgccagtgatggtcatgattcgcccccgtggtggtaactttgtctacaacgatcaagaattaaaaattatggaagctgatattttttcagcacaagaattaggcgctgacgggattgttgtgggttgcttaacacctgacaataagattgatgatgaagcaatggaaatgctaattggcgctgccaatgggatgcaagttgttttccacatggcttttgacgaattagcagtagctgaccaagccgaagcaatcgactggttggttgaacatgatgttaaacggattttaacgcatggtggcccattaacggcaccgttaaatgaagaacgtcttcaagaactagtgcgtttagctgacggtcgcttaggcattttaccaggcggtggcattacagcggaaaacgttgctggtattactgaacgattaaacgtgacagaagcacacggcactaaaatcgttggttaatccaaaaattgagcaatcaaaaaaggtttccggataaaaataacttttatccggaaacctttttattttttgatcacggtcagtagttgaccgacatcttggttgacgccttgaaagtggcgaactgcataacgctcaggattgaggcgggttaaatctgcaactaagtagtggatttcttcttccgatttaaaaaagtgattatcaatgataaaaagtaataaaccgccccgattgagacgggataagacttgatggtaagccgagatggtcgtgttagggagcgtgacatcttgagaagtctctgatgaaagtgagccaagactgaagatggccgcttgcacctttaaatcggcgggaagagcagtgatgattcgctcgtggccttgattgatgagggatacctgctggttaagattggccgttgttaaccgtttttgacaagttgccaacgcttctttttgaatatcgaagccataaacatggccgtaatcggcaactttttccgctagaaataaagtatcgtcgccatggccaacagtggcgtcgatgacaacatcgcctgggcgaatggcctggtctaataggaagtgggcaaaagaacttggctgatcaagtagcatgataaaaatcccctttaattacgatttttgctgcaataggtggtagctatcaaaataataccacgaaaggcctaatccggttaaggctaacatgaaaccggctaaaacatctgtggggtagtgaacctgcacgtaaatccggctaatcccaatgaggagcgtcagtattaagcacaaaccaattactaggtgccgccaatagtgacttttaataaggtaaatggcaataatacttaatgagccaaaaaataatagggcaccagaagaatgaccactaggaaaactaaagccgctagcgactaccaaatgatgcgcgctaggtcggggtcgagcaacccattctttaataatgtggtttaaactactgaaaaccgccatattgactaataagaagagcgcagcattattctgacggatgaagagcaaggtaagcgttgctacgactgttaatcccagcatactataaggattacctatgcttgtgatagcgattgctatagtggttgttaaaggtgaagcaacgctacgaacgatatgaatgatgtgactatcgaaagtattaatccaagttgcttggtttaaaagactgactaaaataatcataaatagtgaaaagcccactatcattgatgcgagttgttgcttttgacgagacatagtgaacccctttcaaattctataataacaatattaacggtctgtcgccttgaactaattttaaatcgattattaaccgcttataacatatacgttgttttataggattattaatattataatatattttagataaacttaataaagatagctattactttaaagaaaatttatatggaggtttttatgttgaaagagactagaaaacaaagaatcgcgacacaaaaaataattttaaaccgtcaaaaaaaggaactacggaataagaaagtgcggcatatgacgacttttgcaggagctagtttcttgatggggtctgcggttgcacctagtctcacgagcggtaaagttaaggcagctgttgaaacagtgagcgccaacgaaaccaacctcaatacagcgacatcaagtacaagtagtgttgctaatagtacgacctcaacaagtagtactgaccaagcaacaagcagcagtcaaagtcaatcaagccaaacaacaagtagtagccaaagccaatcacaaccagttgtgaagcctcaagtgactgaaaatgatgcgaataaggcagctacagctcaacccaaaccaacacaagcacaaccagttgttggcacacaaaatacgggtgctaatatcgcaacagctcaagcgattatggcttattcatcaaccagtgcatcaactttcatcaattcaattgctagctcagcacgtcaattagcaagtgaaaatgatttgtatgcttcagtaatgattgcccaagcttctcttgaatcaggttttgggaatagcgctttaggcaaagcccctaactacaacttattcggtgttaaagggagttacaacggtagctctgtctacatgttaacaaacgaagatgatggtcatggtaatctttatcaaatcaacgctgctttccgtaaatatccttcatattaccaatcactacaagattacgtgcatgttttgaagaatacttcttttgggtcaacaccttattatcaaggggccttcaagagccacacaacaagctatcaaaatgcgacgcaatatcttcaaggtcgctatgccacagctacgaactatgcagctagtttaaatcgccttatccaacaatataacttaacgcaatatgatacacctgctacaagtggtaataatggtggtacgggcacaacaccaacgaacccaacaacaccaactaaaccaacgaatggtgaaaagtatacggttaaagctggctattcagtttacggcatcgctaaacgttatgggatttcaatgagtactttaattagctggaataacattaaaaataatatgattcaccctggtgatgtcttaatcgtttcggctaacaaaccaacaacaccaacgaatccgacgacaccaaccaacccaacgaatccaaaaaaaccagcaaatggtgaaaaatacacagttaaagccggcgattcagtttacggcattgctaagcgttacggtatttcaatgaatacgttaattagctggaataacattaaaaataacatgatccacccgggcgatgttttgattgtttctgctaaacaaacaacaaacccaacaacaccaacgaatccaactaaaccgacaaatccaacgaacccaacaacaccggcgaataaccaaacttacacggttaagtctggcgattcagtttgggcaatctcaaaccgctatggtgtttcaatggcgaacttagtgaagtggaataatatccgtaataacttcatctatcctggtcaaaaattaattgttggtcaaaaatcaacgggacaaacaacaccgccaacaaataacaacaacaatagcagtagtaataataacaatggctcaacaacgacaaccgctaaaacctacaaggtcaaagctggtgattcagtatggcggatttcacaacaatcaggaatctcaatggctgaattggttcgtttaaataacattaaaaataattttatttatccaggtcaagtgttaaaagtcagtgctggtaaaacaacaactaacaataacaaccaaacaacgcctaataaaacaaagtcttataccgttaaatcaggtgatagcctatggtcaatcgctcaaaaaaatggtacgacaattagccaattgaagactgccaataatttacgctcagatttaatcttagttggccaagtcttgaaattgaagtaagagtttggtatgctaagaacaattatttaacgttgagagggattagtagttaagtgaaacgtccagagagcgtgtggttagtgcgaacacgtcgttgaacttagcgaactcacctttgagttttctattgaaatcaagtagatagaaacgtcagccacgttacggccagagagttgctcagtttgaactgggcagaacttaggtggcatcgcggtcaattcgtcctatggtatttataccataggactttttttgacgttaagtggattaaaaaagagtgcgtcaaaagtgtctatacttttgaaagtacgctaaaaataaggagtgtttgatatgacttacgatcatcgcgcagttgaacaaaagtggcaagcctactggcaatcacataaatcttttaaaacaacagaagataaagataagaaaaatttctacgcattagatatgttcccatatccatcaggacaagggttgcacgttggccatcctgaaggctatacggcaactgatatcttggcccggatgaaacggatgcaaggcttcaacgtgttgcacccaatgggttgggatgcattcggcttacctgctgaacaatatgcgttagatacggggaataaccctgctgatttcacgcaaaaaaatatcaacactttcaaacgtcaaatcaattcattaggcttctcatacgattgggatcgcgaagtgaatacaacggatcctgatttctacaaatggacccaatggatttttgaaaaaatgtacgaaaaaggcttggcttatgaagccgaagttgctgttaactggagcccagatttagggacagttgtggccaacgaagaagtgatcgacggtaaaactgaacgtggtggttatcctgtttaccggaaaccaatgcgtcaatggatgttgaagattacggcttatgctgatcgtttaattgacgacttagaccttgttgattggcctgaaagtgtcaaggatatgcaacgtaactggattggccgctcaaaaggcgctgaagtttcatttgctgttgaaaaccatgacgctaatattgacgtcttcacaacacgtgccgacacaatgtttggtgtgagttacatcgtgatggcgccagaacacaaattagtagctgacatcacaacgcctgaacaaaaagctgccgttgatgcatacttaaaagaaatcgaacacaagagtgatcttgaacggactgatttggctaaggacaaaacaggtgcctttacgggtgcttatgccatcaatccagtgaacggcgaacgtttaccaatctggatttcagattacgttttagcttcatacgggactggtgctgtcatggccgttcctgcacatgaccctcgcgattgggaatttgccaagaaattcggtttaccattgaaaccagttgtttcaggcggtaaccctgaagaagctgttcacacagaacctggtgtgatgatcaattcagatttcttagatggcttagacaaacaagctgctatcgacaagatgattccatggttggttgaacacaaagtgggtcatgaacaaatcagttataaattacgtgactggttattctcacgtcaacgctactggggtgaaccaattccaattattcattgggaagatggcacaacatctgtcgttccagaagatcaattgccacttgaattaccattaacaagcgatatcaaaccttctggtactggtgaaagtccacttgcgaacttaacagactggttaaacgtgacggacgaaaatggtcgtaaaggccgtcgtgaaacgaatacaatgccacaatgggctggtagttcatggtattacctccgttatatcgatcctaagaaccctgataaattggctgattttgacaagttgaaggactggttaccagttgacatgtacatcggtggtgcagaacatgctgttcttcatttactatatgttcgtttctggcacaaattcttgtatgatatcggtgtcgtcccaacgaaggaaccattccaacacctatacaatcaagggatgattttaggcgataaccacgaaaaaatgtctaaatcaaaagggaacgttgttaaccctgatgatgttgttgatcgttttggtgctgatacattacgtctatacgaaatgttcatgggcccattagatgcttcaatttcatggagtgaaaagggcttagccggcgctcgtaaattcttggaccgtgtatggcgtttatacacagaagaagatacggacgaaaacgaccaactttcaagcaagattgtcgctgacaacaacgatcaattgaagaaggtttataacgaaactgttaagaaagtgacagaagacttcgaaagcatgcactttaacgtggccatttcacaattgatggtcttcatcaacgatgcttataaagcagatacattcccacgtgaatatgctgaaggcttcgtgaaattattagccccaatcgcaccacatatgatggaagaattatgggcaatgcttggtcatgatgattcaatcagctatgttgattggccaacatttgacccagcagcattaatcgctaatgaagtagaagttatcttccaagttaacggtaagttaaaggccaaagtaacagtggcgaaagatacaccgaaggaagaattagaagcgatggcaaaggccaacgaaaaagtagccgaatttatcgcagacaagacagtccgtaaagtgattgccattccaaacaaattggtaaacattgtagcgaattagagtgcgttcaagctcgggcaacttttgagcattatcagagggaagcgaataagcgacgcagtcggttgtttgattcactgggataagcgcagaaagttagcttgaaaagcacgtttcagacaagagtgcgtttggttgcggtcagcaactgagcattaataaaaaattgtaaataatccaggttttaggattatttacagttttagattaagcggaagttgttgcaaccaaaaagcacgtttcaaaaaagagtgtgtttcaggtggttatatcgtgaagattagcctaggctcgtggataatcgacaaagtcgattatttgcgggacgtagctaaccacaatgatatacctgaaaaagcacgtttcaaaaaggacagacaaattcaattttgtctgtccttttttcttatctaaagttaatagttaggaacctaacaaatactattgacctacaaaaccttatttaatagcattctaaaatgataaaaagattagaaaagatattgattttcctctttttttattatacgatgataagtaaatttagattgtcgggttaaccaacaatggggatacctaaatagaagggtttgaggagaatgaaacggaatttaaatgcccgtcagatgcagatgattgcattaggtgggacaatcggggtcggtttgtttatgggggctaatacgacgattaaatggacaggaccttctgtcttaatcgcttatggtattgccggtctattattgtatttaatcatgcgcgctttgggggaaatgttgtacgttgatccagatacgggatcgtttgcgaaatttgcaacggaatatatgcaccccatttttggttatttgacagcttggagtaatgttttccaatttgtggtcgttgggatgagtgaaatgattgcaatcggtggctatctagaattttggtggccgaatctgccagggtgggtcccaggtttagtcgcaattacgttcttatgtgccgctaatctcatatcggtcagcatgtttggtgaactagaattctggtttgccctaattaaagtggtgacgattgtgttaatgattgtcgctggtctcggattaatcatcttcgggattgggaatcacatgcacccagttgggattagcaatttatgggcacacggtttcttcacaggtggattcaaaggctttgtctttgcccttgcgattgtccttgcttcttatcaagggattgaattaattgggattacggccggagaagccgaaaacccacaagaaaccttagttaaagcgattcaatcaactgttgctcggatcctcattttctacatcggtgctattttcgtcattttaagtatttacccttggaatgaactcaaccaagttggttcaccatttgttcaaaccttcgctaaaatcgggattaccgccgcagcctcaattattaatttcgttgtgattacagcggccttatcaggcgctaactctgggatttacagtgcgagccggatgacgtttacgttggctaataatggtcaattaccaaaacgtttcttgaaactcaaccgacatggcgtgccattctacgcggttggtgcgatttcattagggattttaatcggtgtgattttaaacgcgattctaccattggtttatcctaaagccggcaacatcttcgtccttgtttatagttcaagtgtcttgccaggaatggtgccttggtttgtcatcttaattagccaaatcgcctttaggaaacaacactctgaaaagatggcaacccatccatttaaaatgccatggtcaccatattccaactacatcacgttggcaatgttgtgcttaacactagtattcatgtttattaacccagaaacacggatctcattaattgtcggcttaatctttttagtcctgatgattgttatttatttcgtgaagtttggacgtcaaaaagaatagaagagtgtgccataagttcaggatatgacttatagaacacggttagattatcaatattcaaatagtgaagaaggcgccaagacaagcattacttgtcctggcgccttttttgctatccagactcctatcgtctagacgtgctttttggttgcaacaacttccgcttaatctaaaattggcagtaatcctaaaaccttggattactgccaattttgtattaatgctcagttgctacccgcaacctacagcactcttttttagtagattggattaatttgatcacgatgcaagacattgatcgattccccagctgattggcggcggtcgatattatcttcaccccataagcagagtaggttcaaaatcttattgagtgattgaccgtattcagagaggctgtattcaacccgcggcggaatttcttgatagattttccgattgataatcccgtcggcttcgagttcgcgcaattgttgcgttaaaactttttgagagattttagggatattttgtaagagttcacttgagcggagtggttgattccgtaagtggcataaaatgacaggtttccatttaccaccgatgatttccatcgtggcttcaacaccaatgttataagttttctcattcatttctaattttgattcaccttttcattgtgataagactcaattattacttttcagtaacctactgactaaaaagtgcgtgattgtgaaaatgacgcttctattgaataatatagtacatcagtaaaaaagtctattaggagtgtgggaaaatgagtaaaaagcaacgtgcgaacttaactttgttagcattggcgattagtgcctttgcgattggttcaacagaattcatcagtgttggcttaatgccgttgatgattaaagattttgggattacaatgagccaagccggcttaaccgtttcaatgtacgccttggggattacgattggtgcgcccattttggctatcttaaccagtcgttggccacggaagaatttattgttggggattatgatcgtctttaccattggtaacttaacggtggcctttgccccagtcttctcagttgttttaatcggtcggattatttcagcgttatcacacgggatctttatgtcaatcgcatcagtgattgcggcggatgttgtggaaccagaacgccgagcaagtgcgattgccgtgatgttcactggtttaacagtcgcaactgttaccggggtaccgctggggactttcatcggtcaaatttcaacctggcacatgtcatttattttcatcgctggcattggtgtcttgggcttaatcgctaactggttcttggttccaaacgacttaccgttgggtcaaccaagccaatttagtgggattattcgggtcttcaaaaataaagcaatcgtgattgccttattaattacagcccttggttatggtggcacattcacagtttatacttttgtgacaccaatcttacaaacgaagatgggttggtcaccaagtgcggtggttattatcttagttgtttatggcttaatggttgctgtagggaacacgttaggcggtaagtggtctaaccacaaacctttgttggcattattgagaatgtttgttgggttattagtaaccctcatgttattcatgctaacattgaattcacattggtttggtttaattaacgtcttattgatgggctttttcgccttcatggacgttcctggtttgcaactttacattgtccaacttgctgaaaagttcacaccaaacgatattccattggcatcggctttgaatatctcagcctttaacattgggattacgattggctcattggtcggcggtcaagcttctgccgcttggggcttgggtagtacaccaattttcgggagcatcatggtgttcatcagtatcttattaacatggtacttgattaaacaaacaacgaaaacgaaataaaaatgaaacggggtctgcggaagcggatcctgttttttttattgtgatttttttgcctaaacttcacaagataatcggctgaaacgtgctttaacgagcaccttcttccgtctagcgacgcttagcaaacgatccgctgtgcggcccattcaccaagctatgctatactcagaagttaaacgctcggtaaagcgctctaatttgaaacgtgcttctgatggcaacaacttccgcttaatctaaaataaccattaagcttaaaagcgagattaatggttatttttaattaatgctcagttgttaaccgtcatcagaaacactccacgtttgaaacgtgctttagtacgcaacttcttccggttagcgacatcagtcaaatcgacgattgcatcgtcaattcgcctgattaggctaatcctcagaagttaaacgtgtactaaagcactcttttttcataaagttttgttaaaggaattgcaaggtttcaggcaatcaactaaaatagtaggaagatgcttttttgacgtttaataagggagttatggaaaatgaccaattcatctgatacaaaggcgacggataaatcttcacagagcaagatgttgcggggatccgcttggatgactgccggaagtattttctcgcgaattctgggagccatctatgttattccatggccaatctggtttggggttaactttttagcagccaataatttatttggccgaggataccaaatttatagtgtgctaatcgttgtctcgactgctgggattccgggggcactctcaaaacaaattgcgcactataacgaaatgaatgaatatggagttgggcagaaactctttcaaaaatcactaattttaatgctgattatggggattttatcggcaggtgcgttatatcttctagcaccggtattatcccaaggggatgccagaatgattccggtgttccattcactttgttggccattgttggtgattccactcttaagtattatgcgtggttttttccaagggtatgctgagatggcaccttccgcgatttctcaatttattgaacaagttgctcgggtaatttatatgactgtgactgtttttgttatcacacaggtcttaagaggaagttacattgatgctgtgactcaggcaacttttgcggcatttatcggagcggttgctggtctacttctactgatttggcactacttaaagcagcgaccacggattgaaaagttaattgctggtagtaataatgcgataactgtttcaacgaatgatttattgaaggggattatcaagcaatcgattccttttatcgttattgatgctagtattaatttagtctatattattgaccagtatagttttaatcgtatgatgagtgattttgtaattgcttcggatcaccaactttggaatctatatacgctttttgcggttaatgcgaataagctgatttcaatcaccgtttcattagcggccgcaatggcggttacggcggtgccattgatgtctgcggctcatgtgcgtggcaatcaaaaagaattacgccaacaaattggcagtactattcaactttttaatttagtcatgattccagcggctttcgggatggcagccgtggccggaccactttataccttgttctactcacacgatgccttagggattagtgtcttacaattttcatcgtatatttcaattctcttaggcctcttcacggttttaggcgcgattctacaagggttataccaaaaccggttagctttgttctatctattgattgggttcatcgttaaagttgtggcccagtacccagccatttatttcttccgggtatacggtccgctcgtgtcaaccggcttagcctttgcgacgagttccattttgatgttagccgccttacatcgctattatcattttgatgtttggcaaacgattcgccgtttaatcggaatcgtcggcttctcagtgattatgtatctgatcacatcactaacggtcaaaggcttattgttagtattcaatccacaaagtcggcttcaaagtgtgctcgtccttatgattagtgtcgcagttggtgggttagtctatgctgtgttagcgttgaaatcgcgcttagccgattatgttctaggcagtaacttagaccggtttagaagaaagttgaaattaaaatgagaattgatcgttttttaagtcatatgaatgtcggtacacgtaaaacgctcaagccattactaaaggcaggtcgggttcgagtggccgacaaagttatcaaagaagcgaaatatcaagtgaccccagaaacggtggtttacgttgatgatgaaccgattcgctatcaaactaatttttattggttattaaataaaccggcgggtgtgatttcggccacaactgatccgcaaaaaacagtcatggatttattcgcaccagcagattatcgggaagacttattcccagtgggtcgtttggacaaggatacgacggggctattgctgatcaccaatgatggcgacttagcccacgatttattgagtcccaaaaaacacgtggccaaaacgtaccgcgctaaaattgccggggtggtaacagcggctgaccaagcacaatttgcggctggtctaaagttgcgtgattttgatgcccaaccagcacaattgacgattttaaggactgatacagcgcgccaagaaagtttgatcgaagttgaaattcatgaaggtaagttccatcaagttaagcgtatgtttcatgcggttggcaaagaagtactgactctagaacggattaagatggggccgttaagcttgccggctgatttaaaacgtggacaataccgggcgttaacaacaaccgaaattgatgctttacaaagagcaacacaaaaatagcagttcgctaaaagcggactgctatttttattgatgagccatctgcgccatgaattgtggtaaagcttgaatcatttgagtgggtaaagtgacgtattgcttttgggcgagtttatctgaaatggcgctgtgcgtatagaccgccgcgctaatagtttgatagttggtgccgaattgaccacaaaaagcagcgataatcccagttaaagtatcaccactaccaccggtcgccattgcgggtccgccaatcatgagttgactgacttgtgtttggtgataaatttcggtgtggtgtttttttagtacgagcgtggcctttggataatcagccagtgccgcttgattattagcgacagtttgttgtgcaatcgatagaccgcttagacgcgcccattccatttggtggggcgttaaaatcagttgcgcatctggtagggcgagtttttcgcgggcgattaaggtaagcgcagaaccatcgattaagagggtttgttcaggctgagcagcttgcaagacctgtttcaaaagaagcaacgcaaaggcacttaagccaagcccaggaccaatcacgataacatcggcggcttgaacagtgggtgcccattggacgaagggttgccggtaatcaataaacatggcttcgggtaagctggtgtgcaggctagcgagaatgcttaaatcgctagccacggaaactaaccccgccccggcataaacggcagcagaggcgctcataatagccgcaccgccatattgctgactaccgccgatgattaaaatacggccaaaatcgcctttgtgactgatagcgggccgagccacaatcacttggcgggccaattcgtctgtgataatttgcatacgatgacctcctttagttgcctctattataagcgaaatagtattaaaagggtattggcagggcttcacaacactggtacaatagtcatgtagcaaatcgcccgtgtggcggaactggcagacgcgcagcgttcaggtcgctgtttgggtaaccgagtacaggttcgaatcctgccacgggcattatgaagtgcttataagagactgaccgagttgtttttagcaacccggctagtcttttttattgctcaggatgattaggttgacttttcaagtctacggttgtaaactaactttattgaatgaatgatcgtttcgctgaggcgattatttttttgaacaattagtttacaaatgtagatattggaggatatggcaatgacacaaatcgttaaaattacagggatgaaatgtgatggttgtacgcaaaacgtgcaggaacgcttctcaaaaattgcgggggctcaatccgttgaagtgagtttagaacaaaaacaagcaacgctccaaacggctactgaaattgatcatgcgaccttggcagcagcacttgaaggcacacactacacggtcgactagggttaccggattgaagggagcaaccagcaaatgacaaccaaaacgtttaacattgatgggatggtgtgcgcttcttgtgcacaaacgattgaaggggcaacgcaaaaattgccaggcatgcaaaaagcggcggtcaatttggccactgaaaaaatgcaggtcgaatatgacgattccgaattatcggtgaccgcgattgaagacgcggttagcgcagcggggtatggcgcaacggaacagattgacccggaaaaagaagcgcaggcgattcaggccaaacgtaaggctcacttacaagcgctttggcggcgtttttggttatcggcccttgtgacgttgccgcttttatatttatcgatggggcatatggttggcttatcgctaccgacgttttggcaaccgatgcaagcgcccattaactttgcggtcacccaactagtattgacgttaccagtgttatattggggccggcaatttttcattgtcgggtttaaggcgttattcaatgggcatcccaatatggattccttagttgcgctcggtactagtgctgcttggggttacagcttaatcgccactttagcgattatcagtgggcatgttgccttagtgacgagcctctattatgaatcagccagtgttattttgacgttgattacgttgggtaaatattttgaagcgcgttctaaggggcagacctcatcagcaatcgaaaaattgttgaatttagcgcctaaacaagcgacggttttacgcgagggtgtcgaaacgacgattgatgtagctgaagtggtcgtcggcgacgtgcttgtggtccgtcctggcgaaaaagtgccggttgatggggaagtaatcgcgggccattcggcagttgatgaatcgctaattaccggtgaaagtttaccggttgaaaaacaagttggcgatgctgtcattggggcgagcttgaataagaatggtcatttccagtttaaagcgactaagattggtaaagatacggctttggcgcaaattgttcaattagtcgaacaggcgcaagggactaaggcccccatcgcacggttagcggataagattgcaggcgtttttgtcccaatcgtgattggtttggccttattatctggtttagcgtggttctttttaggacaagaatcgtggctctttgcgttaacgattacgatttcagttttagtgattgcgtgtccatgtgccttagggctagcaacccccacggccattatggtggggacgggcaaaggggctgaaaatggcgtcttgattaagagcggtgacgcacttgaaacggcgcaacatattcaaaccgttgtattggataaaacggggacgattaccgccggccaaccaatcgtgactgatatggttgtttatcagggcactgaagatgacttgttacaattggcggctagtgtagaagctggttcggaacatccgttagcaagtgcaattagccaagcggccagtgaacgccaattaaccttatcagcaatgaccgatttcacagccattccgggttacggcctatccgcccaagttgcggatcagacgattttatttggaaatcaacaattaatggctaaaaatggtgttgccatcgaagtcggattgaagacggcgcaacaattagctgaacaaggcaagacaccgatgtacttggcccaagacggtcaattacaaggggtaattgcggtggccgatccggttaaagcaacgagtcaagcagccatcagtcgcctgcaaaagatggggattcaagtcgtgatgttgaccggggataaccaaaagacggctcaagcaattgcacaccaagttggaatcgaacaagtgattagtgatgttttaccagaacaaaaggcagcgcaaattaaaactttacaagcaaccggccaattagtggcgatggttggtgacgggattaatgatgcgccggctttagcgcaagccgatgttggcttagcaattggttcagggacagatgtggccattgaatcagccgatattgtgttgatgcacgatgatttaatggcggttccaacggctttcaagttaagtcgaaaaacgatgcaaaatatcaaagagaatcttttctgggcttttgcctataatattctcgggattccagtcgcaatgggggtcctgcacttgttcaggggaccacttttaaacccaatgattgctggggcggcgatgagttttagttcagtgtcagtgttattaaatgcactacgcctaaaacgattaaaattagcataaaaccgaaaatagcactgacgcgttaaatgcgtcagtgctatttttaatgagttagatgtaaacggttgcgacgacggaccgaaaccgttatattattaaggtaactaaggataggggagcgttaagcatgacagttaaattaattgcatcagatatggatcataccttattaaacgaaagtggccagttgccaccgaattttgaacaagttgttaaacagttaacggccaaaggcatcattttcacagcggcgagtggtcggccactctatacgttgaagcagatgtttgctaagttagaaaatgacatgtgcctcgtgggcgataatggcggggtcatcagttatcaaggtgagattatcttcaagagcttattgccattgactgattatcaacggatggtcgcttttgtgaacgagagccaaaccggaatcgggatgatttgtggaatggatgccgtttatattgaagagcaataccaagctttagatgcgacattccgtcaattctatgccgaaatcaaatacgttcccgatttaacgcaagtgagtgttgaagcggataaatttacggtttatttcccagaagccaatagtcgcgatttttatgaacaaatttacgggccaacatttggcgctgactattcagtggccgtggctggtgtggaatgggtcgatatcatgaacaaagggattgataaaggccacgcgatgcgctttttagctaatcatttcaatatttcaacggctgaaatgatggcctttggggatacgtataatgataaagaaatgctccaaacagttaaatacagttatttaatgggtaatgcggatgatgatatgttgcaatatgccacctaccgcgcggatactaacgagaattatggcgtgttgcaggagattgagaaattgctgtaagcaaccaagcataaatcgcttgttgctgttcaattgcatttgtttcttgtaaaatttcatgcgctgtatgtggcaaaatgcgcaccgtggcgttagtgacggtgtgctttttaaattgtgtcgctaaatggcgggcgcggcggccataaccgcctgcaggatcgtcttggccactcagcactagtactgggcgttcttttaaggccagttgccaatcagcgtggcgcgttaattctgtcagtgtcaacaacatcgcaaagccgctattgctgaatacataaccgcaaaggggatgattttcgtatgctgctatattgtcctggttataactaagccacgagaatggccgtttggcgtcaaagcgtttaggataaaccccgaaagccaggttattcaaaagcttacctggttgcttaggcgcaagagccccgattaaattgacaagtggtaaaacaggcttgagcacgactgggacgtcaataacgcccataaaaattgcgccagccagtgggacagttgtttgtttgacatattgagtggcaagcattgaccccatcgaatggcccaacacaaatagcgggcattcggggtattcttcatgggcgatgcgcccgattaaagtacaatcgtttaagagtgtctgtaagccatgggggccaaaatagccgagttcatcggtcgtctgaacggagtgtccttgacccacatgatcgtggccaatcacgacgatgccgcgagcggctaaaaattgagcgagtgcgtcatagcgttcgatatattcggccataccggttagaagttggacaactgcaatcggtttttgagttggtagccaagcaaccacgtggagttgatgctgacggtcggttgattgcacggtaaattttttcatgtttaagcgcctccatttatcgcttattctaacagaaacgctgatatgatagcaaaaaaagagattgaaacaaaaataattttggtttcaatctcttttttaatgatgacacattcttttagcttaaacgtgttctatcagtcatatccttgcagttaacgccgcatgtcaaataattaccgttggcaatcattcgccatgctctgttaatcctcgggacatccccgactgatgacacactctttttaaagctgtacgtccttattgattcgtttggcgcgtgagaagtatttagagtagaagcgactgataatgccccaataatagaagatgagggctaaggcgctaattaggacgaaatcaagcggataaggaatcacgttgataccgttaaactcacgactaccaaggaaggaaatcaatgacagtaaggctaaataaataatcaaccagagactgcctttgaattgtgcccaggtattttcccaatgaatccgatattcatagtagaaataaaatggtaggccaagcataattacgccgataactttgatagttgtaggccacattgcccagtaagtcgcaagactagcgaggacaaaggataaaggcgccatcactttcatccatggtgaatggacagggcgattcatatccggggccattttccgaagtgacatcacggttaccggaccggtcaagtaagcaatcagagtcgccgtcgaaataacgctggcaagcgtgccccagcttctgaagacggaaactaacaacatgctgactacggcgttgatcgccatggcgactctggggatattatattggtggttcatcttaccgacaatcggtggcatatgtttgttttgcttcaaggccgccagtgtgcgggcacaggatgcaacaaatgaaacgccggtcccaaatggcgagatgaaagcatctaagtataataggacagcgagccagtgaatccctaataaaattgctaaatcggcaaatggtgattggaaattcaagccatgccaaccggttttagcgattaaagcgggagaaacagcaccgataaaggtgatttgaagtaataagtagataacgatactaataccaagtgaaatagcgatcccgcgaccaatattgcgtttagaatcccgaatttcgctcccaacattaatgaccgtttgaaaggcattgtaggaaaaaataatcccggaaatcgaggttgccgcaaagatcttagcagaaccatatggcataaaggttgccactgaatggccgaagttttccgcatgaaagccagttgagactaacatgataatcgtcagcaatggaattgctaatttaaaaatggcgatgaaactcgtgaaacgagtcaagaatttaactgaccagaaatttaaaagggtaaagacaacgataaaagcaaaaacgactagtaaaccgcgagttgaaatttcattatgatgcatgaaatggtttgtccagttggcccaagcccagggccatgaactcatgtattgaacagcggcgacagcctcaatggggataatcgtgactaacgacacccaattagaccatgacgcaataaaacctaataatgagccatgactgtactgcgcataatggctcatgccaccactttcaggaaacatggtccccagttcgatgtagttaaaggcaatcgccccaatcacaatcgcgccgacaatccatgaaataatggcagccgggcctgcgacagtggttgcttcccaagcaccaaatagccacccggaaccgatgattgagctcagtcctaacatgactaagctgaataaactcattttgttcttttctagcataaagacctcctgtgtatggtgtgctattatagcaaccatcaaagtggtatacaaatgaattttagcaacgaaaataggcgccagtagtgaccttaatagtgtgatggcggttacaaaaaaagttggtattaaattttaaacactaaaaaagaagagtgtgtcatcagtcggggatattctgaggattaacagagggaggtgaatggtgactggaagtcaccgtttacctctcggcgttaaacgtaggaatatgactgatagaacacgtttagacattaaaaaaatcataagtactaaaaaagacatcacacaaaatagtttctgcgtgatgtctaggtttaatttatagttaagttagtgattgtggtgaattgcgtcactttgtttgaacatcttaatcttacgatcattccagaaagtttcagacatatcacgataaaagatggcagtctgacagctcggacagcgtttgataccgtaatcaatacaggcttggcacgctggacaatgaaaagccgatgattccgaaagttcttgcgatgtttcttgagaatctttcatcaataggactccaatctttgagttgttagctttagtatacagtattgatagggtacctgttaagtcattgcatcattttttcaaaaaaatattcacaaatctgggagattatgctacaataaatgagtaatgcgagtgtagtttagtggtaaaactcaagcttcccaagcttgcgtcgcgggtccgattcccgtcactcgcttcatggataacagttgaataaatattgaagaagttagaccaagatggtctggcttctttttttgtccaaataaactgcaagatgatataataatgcaatcttgaagagctgatttttataaaatgacagcgcgtcatttttaagactttagactgattgtttgttaaggtcggtttggtaaagtagttttatgagcaaagccccgcgacatgatgctgggggtactataagtagtaggagcgtagttaattgacattattagagatcaaagatattcataagtcctatcatgtgaataaagaagcgtttaaagttttaaaaggcatcaatcttaaatttgatcggggcgaatttgtgtcgatcctaggggaatctggtggcggtaaatcgacgttattgaacattattggtggtttggatcatcaatatgaaggtgaattaattgttgatggcgaatcactgaagaatgcttctgaaaagaagttcgatgcttatcgcagtcagacaattggcttcattttccagagttttaatttaatcagtcacttcaccaacttagaaaacgttatggtcccacttgaaatgaccgctttatcgcataaagaacgggctgcaaaggcaaccgccttattagaacaagttggcctaaaggaacatatcaataagcatccaaaccaactatcggggggccaaaaacaacgggtcgctatcgcgcgtgcattagctgccgatcctgatgtgatcattgccgatgaaccaaccggtgccttggatagtcaaaatactgctgaaatcttggcgattttacaaaaaattgccgaggatgggaaactcgttattgccgtgacgcattcgcaggctgttgcggattacggcacacgcgttgtccacatggttgatgggcaaattgattatgataagcgcctcaaggatgcttatccagcaccagcagaatcctcacctaagaaaaatagtccgttgagtttcatgtcagcctttaaaatggcgatgcaacatatgcgctatgacattaaacggaacttgttaatcatttttggtgcatccatcgggattttctcagtgattttaatgttgggcttaggccaaggggtaaccggctacatcaatgatcaggtatcatcccaagtgaaccctaatacgattcaaatcgcccggaatgtgagccaaaaacaaattgaaaatggcgaccaagggaatttagctaataaagatattaaacgctttgacaagattaaagacgtgacaaaggttgaaaagggctactatacgaatggggtccaagttcactatcaaaagaagagtgaaacaatccaattgttccaaacttttaacaagacggaacggattcaagatattaaaaccgggacaaaaccaggcaccaacgaagttcttttaaccaaagcaactgccaaaaaattagataagaaaaattacaagaagatggttggtcggacagtaacgatatacgtcaatgcgattagcaaggatcaacgaccagttcaaatgcgtcaagatgtgaaggtttcagggattatcaattctgggaccgaagccattacttatgggactttagcaaaaatgtatcaagcccaaaacttagatttagcgcctaactttgccgctgttacggtgaataagacgcaaaacgtcaaagcagttcaaaataaaatcaaagcttacgacagtaaggtaaatggtaaaacgcaaaaagattaccaaattaccggtgttggtgcaatcttagattcaatcaatacgtacctcatgctggccttctacgtcttagctgggattgcagggatttcattattagtttcagcaatcatgattatcgtcgttctttacatcagtgtttcagaacggacgaaagaaatcggtattttacgggccatcggtgcacgtaaaaaggatattcgccacttattcgtatcagaagctttcttgattggtcttttctcaagtgttctaggggctctaattgcctggggtggtcaagcattggttaacgtgattgcgcaaccattgacgcacatgccgattgtggcaattaccagtggttatgtgatctttgggattgttatcagtgtggtgattagtttactcgcagcacttgccccatcacgcaaagccgctaaattagacccaatcgaagccttagcagctgaataattggggttgaaatgtcaacgggacttctatatactaggagtcaagttagaacagtcaaaagaatagtgttagcagcgattaatagcgagtccgggattggtggaagccggataatcaagctaatgtggcgcacttttggttgaacaattgcatactattgagtggatcgattgatcaatcagagtggtaccgcgggaattctcgtctctttcatttatttggaagggactttttttgttcgaaaatttaaggaggctattaacatggattttaaacaacaagttgtcacagcattaactggcgttttaggcgacagtttaccagcagagaaaatcgcacaactcatcgaaacacctaagacatcagatttgggtgattatgcattcccaacatttatcttagcgaaaacattacggaaggcaccacaacaaatcgcccaagatttagtcgatcaaatggacgttgctggctttgaaaaagtcattgctaacggcccttacatcaacttcttcttagacaaggctgcttttagcgaccaaatcttgaagaccgttttaacagaagctgctaaatacggtgaaagtgatttaggtcatggtggtaacgtgccaatcgatatgtcatcacctaacatcgctaaaccaatttcaatgggtcatttacgttcaactgttatcggaaactcaattgctaagattttgacgaaggttggtttcaacccaatcaaaatcaatcatttgggtgactggggcacacaattcggtaaattaatcgtggcctacaaaaaatgggggagtgaagaagaagtcaagaaagaccctatcacaaaccttttgaaatattacgttaagttccatcaagaagacgtggaacacccagaattagacgacgaagcgcgcgcatggttccggaagttagaagccggggatgaagaagcaacacaactctggtcatggttcagaagtgaatcattgaaggaattccaaaagatttatgacatgttgggtgttgaattcgattcatataacggtgaagccttctataatgataagatggatgctgttgtggaagcaatcgaatcaaaaggcttactacaagaaagtcgcggtgctgaaatcgttgacttaacagcttataacttaaaccctgctttgatcaaaaaatcagatggtgccacactttatatgacacgtgatttggcagccgcaatgtaccgtcatgacacttataacttcgtacaatcattgtacgtcgttggtggtgaacaacgggaacatttcaaccaattgaaggctgttttaaaagaaatgggtaacgactggtcagacgaaatccatcacattccatttggtttaatcacacaaggtggtaagaaattatcaactcgtagtggtcgcgtaattcttttagaagaagttttaaacgacgctgttaaattagctggtgctcaaattgaagcgaagaacccagatttacctaaccgtgaagaagttgctaaacaagttggtattggtgctgttatcttccacgatttgaagaacgatcgtttagacaacttcgactttgacttagaagaagtggttcgttttgaaggtgaaacaggtccttacgtgcaatatacaaatgcacgtgcgcaaagtattttgagaaaagctaaccaagaagtcgttgtagacgatcaattagtcgttgctgacgataacgcttgggatgtcttgaagatgttaagcaacttcccagcagtgattgcacgcgcaagtaaagaatacgaaccatcaatcgtcgctaaatatgcattacgtttagcaaaagcatttaataaatactatgctaactctaagattttggcagacgacgatcaaagaaacgctcgcctatcattagtgaagagtgtcagcatcgtattagaaacagccctagacctattaggcgtccaagcaccaaaagaaatgtaaagtgcgtcattaattggtagcttttgagcacttgcctagtgtcgtgaatgagtgctagaggcaatcgtttgcgatacgtaactaagcacaggagtcagctttaaaaagcacgtttcaaaatcaccagcaaccgggtgttggtgattaaagagggccagacaaattaattttgtctggtcctctttttggatacaccacacgcgacttttccttcataatccgctatagtaatggtgaacttttcaaaagggggattttgggatggcacttgtattaaagcggcagattaagggcattccggtgttagaagttgtggcagaaaacgcacgccatgaaccattaccactggttgtttattatcatggttggcggtcggccaaggaattggtcctgacacaggcgcgtaaattagcgcaagctggcatgcgcgtcgtattaccagacgcacttaatcatggtgaacggttgcagccagtatcagaaattccgtcatggactttttggcagagcatccaaaccaatctagcggaatttagtttaatcatcgattattggcagcaactgcacctgattaaagacgacttaattggcgttggcggtgtctcaatgggcggcatgacaacggcggctttattgacgaagcatccagaaattaaagtggcggcttgcattatgggctcgccagcccctttaacatatgcgcgcttggtccgcgataatgttcgtcagcacggcttacaacaaccggctgatcttggcttgttgacgagttggctaacggcctatgatttaacgcaacagccgaacgcacttgcgaaccgccccgttttattttggcatggtaccgaggatgaacgaatcccctacaatcaaatggctgattttgaacggcaggtaaaagggcaatcgtatgcacaaaacgtgacgtttatgacgggccaaggagagcgccatttagtgcaacccgccttaatgacgacgattactgacttttttgcaacgcatttaaaaataaaatctgaataacaaaaagacgctcatcaaaacgaataattttggtgagcgtcttttttgtggttgactttaagagtgtactacgtataatagtacagtgtaatacagtgattgatttaaaggaggtgccaaggcgatgatgattgataaaacaagtgctaaaccgtactacgaacagattattttattgattaaggaacaagtcctacaggggattttaaaaccgggtgaacaaattccgtctgttcgagaaatggcgcggcaattaatgatgaacccgaacacggtaagtaaggcctataaattgttagaagtgcaaggcattatagtgacggttaaaggccggggcacttacatcgctgaacaccaagcgaccgaccgggataatggtaaaatcacccaactgaaggcgcaattacaagaactcgttttagaagctgtttatttaaacgtttcagaggctgagatgagtgaatggttaaccgcacaatttgaaaggggtccaaaagatgctgacaattaacaagttacataaacgaattgatcaaaaatcaattctagaagagattagttttgaacaagaaccgggggaaatcttgggattggtcggtcgtaacggtgccggtaagtcgacattgctaaaaagtattgccagtcattatttattggatggtggtcagattttgattgatcaagtttcaatcgatgaagatcgtcgcttgcggacacaaattttttatttagacgaagatcatttatttttcaaaaatttaacgttattacagattggtcgcttttaccaacaagcctattcgcagtttgatgaaaatcagatgactactttattagcgcaatatcgcttaccactcaaacaaaattatcggcaattatcaaaaggaatgcggggcttattcaatattattttagctatcagtagtcatgcacggtacattttgttggatgaaccatttgatggcttagacgtcattattcgtaaaaatgtcattcgactattgctcgatcaagtgggtgaacaacaattttcactgctgattacctcgcataacctagcggaattagaacctttgattgaccggacactgattttaaaggatcggacaattagtcacgattatcgtttagaaacactccgccaaacagcacggaagttgcaactggtattaaaaaccaacgagattccagcgctagtaaaagaaaaagggcggttattaaatatttcagggcgcgtgatggtcgtttatttcccagactatacagataaaattaaacaggagttagccgcattggaccctgttttatgcgaagcactaccgattacattggaagatgttttcgaagcaaacttaattaacgaacaagactatcaagtcttcgtttagaagtggaggcagtaaaaatgcaaaaacagttaatgaaaattatgcaattacgctattggaagtacttggtcggcttgtttgtgattattgttgggttgcaagggatgagaagtatgactgttgttgataaatggcaatcatctgatcaatattatcattcggaacagtttattaaagattttaagcaacatccaaagtcatatctacaagaagatcgtaaaggccatcccaagaaacaatcattagaggcttttagattagaggctaatcctgtatttgaacagacttacgagtcaggatttatgatttattcaccaacgatgatcgtgctaataatgattgtttttggtgcagggctcttaacatttgccaatgatcgacggactaattttgatacgtttttgtttagcttagagagttcgcggcgacggctatactggacgaaattaggttatggaatcggaacagtattaagtagcctgttgataggagatgttatctactatttaattttaaaattaaaaattggtgcgccatacgttcagctaaatatcctgacgctaattcaacgtgagattggcagccttgtttcaatgttaggaatttttacaatcggttgtttaatagggttactaattggtagttttggttttatttgttcactctctttcgctattactagtatgagtgacacgcgacgttttgtaatgagtcgaggaagtgaacagtatggtgttaatcctgatagtaatggtggcttactcgctaagctattaacaatgggcaatggtcaataccggttgtatcgtaaccaacaacaaattggattaatcattggtttgttcgtagtaacttgtctattgttatggggtggcgcttggatttataaacgcttatcacttgaaaataagaaccaattggtccaaattgctggctttaaaaagccgctggttgttatcggcacattatatttggcttggttgtttgggatgaatggcgttttcagccgccaaccttatgaactattagccaaccatgaaaaaatagtcttactgtgggtcatcttacggaacatcgtcattatcgggattatcggttggctttatacagagcaaccatggcaacgatttaaaaatagaagattaagttaataaaaaacggaagtgtgccataagtcggggatgtcctgaggattaacacagaatggcgaatgattgctgcaagcaatcgtttgatattcagggttaaccggaaggatatgacttatagaacacgtttacatcatcaatattcggatatcgaaaaagaagctgaagacaaaattacttttgtcttcagctccttttttgggatgtgcttggaattgataacgtgcgcctaaaggcaacttcctgtgcttagctacgtatcgcaaataatcgactgaagtcgcttattcacgacactaggctaatcctcggagtataaacgctatgaaaaacacttctatgctttttgtcttcttgcgattgctggtaagatcatacctagcgcaatgaagatgattggtgtgatgatgtttaagcttaattggaaccaccatgttgaagggttagcagcgtatgaaagcttaggaatcatgcccatcaaacaagcaaaggcggtgaagaagaagcaccaactaccgacgattaagccgattttagggttcttagtaaagtgatattctgacgtgaattttttaagttgtttatttaagaggatataagctaagaatacccagaggtaacgaagtggcatgacaactgagtttaagtttaataaccagttgtaaagttcgttcatgttaccaatccctagggcaggcacgataatcaagagaccaacgaggaccccagttaacatataacctttagttggggtgccttttttgttgagttttgaaaggcctttaggaataaagtcgctatcagcatcacccaataaaattttgagtggggcatcaattgagaaggctaaagctgatacttgtgcgagcgtatttgctaaggcataaagaataacaaagagtggcccaacgtggtagaaaacacctagacggcggaaggcttcataagcaccattagccattaaatcagttgggatatggtttgaatcaaataacatgcccatcccaaatgagcctaggatggcacaaaaggccaccatgccggctaagactaacattcctttagggaattctttagcagcatttttagtattgttaacgtaaggtgaaatcttttcagcaccaccaaccgcgaacactaacattgaaatggttgtgaaatagttaacatcaaacttaggaatgtacgttttgatattacccatgtcgggtgtggcaatgtgggcgccttttgtcataaaaggcgctgaaactgcgagaatgatgaagagaattgacatgacaaacatggcagtcccggcaatactcccaatccggtttaaggtcgcgattccgcgcgatgatagccataaaaagagtaagaaaagggctaaacagatgaccgaaacggccattgatgaaatcgtattgacgaagttcccgttacccttaaaaagccagctgagcgcaatgagaatcccttgtggtttttgcgcaagatatgggatgtgaacaacccagtaagtccaagcagcgtagtaagcgagccgcttagtacttgtcgctttgatccaggaagaaacaccaccgttagcatctttaaaagtagaacctaattgaccaacgattaatgcgtaaggaacgaaatataagagcatgatcagaatccaagacgtaataacggagagaccttgttgcgcgtagttattaaccacgttaccaagaccccaaaccgctacaaaggcaataagtgcaacattataccaacggagctgtttcgatttagattgcataagagcaacctccttttataagtatacgatagattgtaaaatttaagttgaacatattagtggacagaaaaacccataaaggtctttaatggtgtcaccacaacattccactagaaagaaggacctttatgggcaccactattttatcatttgaagaccgcgttgtcatcgaaacacttcatcatgaaaagcactcacttcaatatattgccgattatttaggctttagtaaaaccactatctttaatgaggttcatcgcttagctggtgagtatcacgcagttaaggctcaaactgaccatgaagttaaacttagtcatcgtggtcgtaaaaccatcttaacgactaacctaaagcgattgattgaagaaaaaatcaagatccaaaaatggtcaattgaacaagtggctcatgtagttagaattgcctacaaaaccatctataactggattgatcaggaactactggatattaatgtgactgatttacctgaccatggtattcgtcgcaaacgagctaaagaaacccgtggtagttttagtcatggacgttccatcgaagatcgtccagctgaaatttctgatcgtaatacttcaggtcacttcgaagctgatacagttttatctggaaaacgtaaaggtcaagcagtagctacgtttgtcgagcgtaagagtcggcttaccatcgttaaacggcttaatggacgagatagtacttcaatgaccaaggctattttagaattggctaaccagttaggagataatctcaagacccttactgttgaccatgggaaagaattcgccaactacaatttgattgaagaacaggccggtgttccgctgtactttgcgcacgcttattcgccacatgaacgaggcagtaatgaaaatcgcaaccgagtactacgccgcttcattcccaaaggtcaaccgattgatgagattaccgatgatgaattgattcaaattaactggtatttgaattcccgaccactcaaatgtttaaattggcgaacaccgattgagatctttttgcgtaatctgcgttactaaatttgttcaagttatttcttgcaatctgccaaatttaatcaaatggcaatcctaaattaaggaatttgtgaataaaatcatttaagctattgcaggttttatagcttataataggataaaagaaaagttattggaggatgaacgctattggaaaacggacgaatcagacgtgccagccgctttaataaaacccgttttgtttttattttaaaagggttattagtcgggggtgtgacaggattagtggtcagtttgtttcgacttgcgattgaaaggggcttagcactaacgattaagttgtatcaaagcttgcatagtcaaccacttaactggttgtggttaatcggtgctaacttgctaataggcttggttgtggcgcagctattgaaaaaagaacctaatatcagtggttcggggattccccaagtggaagggcaactagaaggcgaatttgagctagattggtggtcgattctttggcgcaaatttgttggtggtattttaagtattgcgccaggcttattcctaggtcgggaaggcccctcaattcaattaggggcggcagtcggtcaaggcgttgcggaccgcttagatgatcacggtgctgatcgtcgcattttaatcgccggtggggcggcggctggtttatcggccgcctttaacgcaccaattgccgggacctttttcgtgttggaagaaatctatcataatttttctccgcttgtttggctaactgcattgaccagtgcaatcggagccaatttcatctcattgaattttttcggattaacgcccacattgcacattacgtatacgcataatttaccgattaatcagtattggcatctaattcttttagggattgtgctcgggttgttgggctatgtctatcaaaaaacgttgctttggttaccacagttttataagcgattaccagtgcctaaatattattggggcttattgccgttagcacttgtattgcccatcggttacttttggccaacggtcttaggtggcgggaatggtttaatcacgcaattaggccaacaagtgccaactttaacaacggtggcattgttactggttttgcgatttgttttctcaatgatttcgtatggttctggcttgccaggggggattttcttgcccatcttgtcactgggagcgttaattggggccgtctatggtttggtgatggtccaactgggctggttagcacctgtttatgttcctaatttaattatttttgcgatgggcggttattttgccggcatcgggaaagcaccgtttacggcgattttattggtgaccgaaatggttgggacacttacccatttaatgccgctggcaattttatcattagtcgcgtatgttgtggttgatttgatgggtggcgcaccgatttatgcatcattattacaacgcttaattggccaacctaaaaccgatatggcacaatttaaggatcgtttggaagtaccgatttttgccggggcaccattggaagatcatcaagtccgcgatgttgcttggccggaaacttgtttattaattgccgtgcggcgcggcgaagcggaattgattccgcatggtgatacgctgattcgcgcgggtgacaccttggtcattttaaccgatcatcacttacgagcaaccgttcgccgacagattgaagccgctgcccaaaccttaaaaaaagcggatgagaatctcgtgaaataattgataaaaaagtggtgattaactactttttatgctaaagtattaaaagacagtgtagatagaaaggtagggaattaggttggaaaatcttatcctgaacttattattaatcgattcaatcttgattgtgatcgcagtcatgatgcaaccaagtaaacaacaggatgctttgagcgcattatcaggtggctctggtgatttatttggtaagcaaaaggcccgtggctttgaagctttcatgcagaaagtgaccgtcgttttaggggctttattcttcgtctttgcaattgcattagtttatttatcatcacactaaagcaagtaggacggatcgaattctaataagaacgttgatgcggtctcctgttcaaatagcaggagacctttttaaatgaattaaatcggtcaagtactggaggcgggtttgaatgcagtatcggttaccacaaccttactattatgatagtggctcagttggcgtggtgctattgcacgcttacacaggaagtgctaatgatgttcatatgatgggccgttttttagagaaacagcaaatcagtgtgcttgcaccgcactttacggggcacgccacttttgaaccactcgatatcttagaagaaggtagtgttcaagcttggtgggcggatacaacggctgccattcagaagttacaagttgctgccaagaaaccactatttgtgtttggcttgtcattgggtgggttgttcgcgatgcgcgcaatcgaaacgatgccagcggtggtgggcggcggtatttttagcgcgccagtactggaaggaccaactgataaactagcaccgctatttatgggctatgcgcaacgcctttatcagattaccgaaaaaacggccgctgatcaagccgttcaattggctaagattaagcaacaattaccacaacaactacaagcaatcgctgattttagcgcgttagtcaccgccgatttagaccagattggtgataagccagtctttatcggtcaaggtggtcaagatcaagtgattgatcctaacggtgcatcagcattaaaacaacgcttagaagcacaacaaacaccagttgattatcactggtatgacaatgccggtcacgtgattacggttgatcgggcgcaccaccaattagaagcagatgttgaagtatttattaaacgttataagaaataaggaagaggtgttgatttgacacaagttgaccaaatgaaagctgccatcttagccatttttgcagcagatgaaacgcaacaattaaacgtatcagaaattagtgaacgaaccggtgtggccggctcacaagggttcaaggatttagtgaaagtattagccgaattagaaggggacaagcaccttttaatggatgatgccggtaaattcagattaccagctagccaacgcttagtcgaaggggttttccacgctaacgatcggggttttggcttcgtctcaatggttgataaagaaccaagtgatcccgatatttttatcgccccaccaaacacaaactttgcaatgaatggtgatactgttgaagtggccatcatcaaagaagcagaagaaaacagccgccgcgggcctgaagggaaagtggctaaagtgattacgcggggcatcgaagaaatcgtcggcgaattcatgccttattcagatatccaaaaagaaaaaaccggcttgattggttacattcaaagccatgctaaaaaattaagcagctatttaatttacttaacagacaacggtttacaccctcaaaaaggcgatatggtacaagtcgatattacgtcatacccaagtatcgatacccctggccaaatgcgcgggattgccaaacaagtcttagggaataaaaacgatcctggggttgatgttttatcaattgtttaccaacatgatattaaaacagatttcccagaagaagttcgactacaatcagaagccattccagatactgttttagaaacagataagtttggccgtaaagatttaaccgaccaaccagttgtaaccatcgatggcgacgattcaaaagattttgatgatgccgttaatgtccgtcaattggacaatggtcacttctacttaggcgtgcatattgccgacgttagttattatgctaccgaaggttccccattagatgctgaagcgctcgaacgggggacaagtacttacttaactgatcgcgtgattccaatgttaccattccgtctttctaacgggatttgttcattgaacccagacgttgaacgattggccttgacttgtgaaatggaaattgacgaacatgggaacgtggtcgatcacaacattttcccaagtgttatcaaatcaaccgctcgaatgacttataacaatgttaataagattttgacggatcaagatgctgacttacgtgatcaatacgcacgtttggtgccaatgtttgaaacaatggctgaattacacgaaatcctcttgaagaaacgtcataatcgtggcgcaatcgactttgaagaagacgaagctaaaatcatcgttgatgaaaacggtaaggcaatcgatatcgaattacgtcaacgcggtctttcagaacgcatgatcgaatcattcatgttggctgcaaatgaaactgttgccgaacattacagtacggctaatgcacctttcttataccggattcatgaaacaccagatgctgataagatgaagaacttcttcgaatttatcaccgcttatggcattcaagttcagggctcaagcaaaaaagtaacaccaatgatgttacaagaagtcttgacacaaattgaaggtcaacctgaacaacctattattacaacaatgttattaagaagtatgcaacaagcgcattattcagatgaatcactgggtcactttggcttggctgctgaattctatacgcatttcacatcaccaattcgtcgttacccggatttaatggttcaccgtttaattcatagttatgcaacaaatggcatgacgattgaagaaaaagaaaaatgggcacctaagttacaacccatcgctgaacaaacatcacttgaagaacgacgctcaattgatacggaacgtgaagttgttgaccttaagaaagctgaatacatgcttgataaggttggtaatgaatacgatgctgttattagttctgtgacaagcttcgggatgtttatcgccttaccaagtacggttgaagggcttgtacacatctctcaaatgaaagatgattattatagcttcgttgaaagtcaattggctttagtgggcgaaagaacccataaaatgttccgaattggccaaccagtacgggttaaagtcgctaatgttgacttagatgcacattctgtagacttcgaattattagcaagcgaggaagttcccttggcttctgctgaaattttgagtaagatagaagcaagacctaagcgcccaactcgtccaagagaccatgaaaaaggcggtcaacgacgtggtgaccaaaagaaaaacagtcatccaagacgaccagtggctaaaaaggactcacaaaaacgtacttttaaaaagtaggtgattgaatggcaaagaaacatccacaaaaaccagctaacttaatcgctcaaaacaaaaaagctgggcatgattacaatatcctggagacatttgaagcaggattagttttaaccgggaccgagattaaatcggtgcgtaagggaaaaattagtttgcgtgatgggtttgcgcgcgttcgcaagggcgaagcttatctggaaaatgtccacatcagtccttatgaacaaggtaaccaatttaaccatgatccattgcgtaaccgaaaattattgttacacaagaaagaaattgctaaaattggtgctttgactaaggacaaagggattacaattgttccgttacgggtttatttaaaacacggttttgctaaggtcttaatcggcgttggtgaagggaaacgggaatacgataaacgagaaacactcaagcgtaaggaacaagatcgtgaaatggcaagagcactacgaaaacgctaattaaaagaggtcggacgatattgtccgacctcttttttagttagtgttgtaaaaaaacttgaaggattacgctttaatcattactatagggggttgaagtgaactaaacaaacacctttattttcttgacgagaaatttgtaatagttaacactaaaacgtaatagcgttaaccatcgttattctgtataattaatctggaatagcgataacgtaggggggcttaagcaagatgcaattcaagaaaatcggtttaatgattctgacagggctgatgattattgtgacgacagcaggaccagtcagcgctgccagtcttagtgaattaaaacaacaagaagatcaaacacaaaaaagtatcgatacgatcaacggtaaaattcaaagcacgttaaccaaagtgaatactaaatatcaagaagttgatcaattaaaaacgaaaattacagaaaatgaagaacatattaataaggccgaaacgattttagcggctcaaaaaaaggaattggcggaacgaaaagattatgccaaggcccacttgcaggcattacaaaaatcagaagataatcgggatgtcttaaatactttattatcggctgattcattgagtgatctatttagtcgcgtctacactttgacgattctacaagatgcggataatcaaaatatgactgatttagcaactagttatcagaaaatggtgacaattcaaaaacacttagaagaaagtaaggccgctttagacaaacaaaaaaaggatttagaccagcaaacggctgatttacaaaagcaagtcgatcagatgaaaaaagacttgagccagagtcaaaaacaacttgctgatattagtaaaaagaagattgaagaacaaaaacgagaagctgaagaacaagctaaagccgctgctaaggcgaaaaatgaggctgccgctaaagctgctagccaaaaattatcagcagtcaataatcaacaacaagccgcgctagctgctgctgccaaaggaaagcccggacagacaattgaagtgcaagcgacggcttattcaacggcagaaccaggcttaagtcgctacggcgcaacgggcattgatttggtgaaaaaacctaattgtattgctgttgatccaaaagttattccgttaaattcgcttgttttggtgccaggatatggttatgcaattgcaggtgatacgggtggtgccattaagggccacattattgatgttcacttcccaagtgttgcccaatgcctcagttggggacgacgtcatattgcaattacgattattaaataaatttaaagcagccctagttagggccgcttttttagtaaaaaaagggcatatcagctcattaatagtctatttagcaaaattttacttaatttaataatatgtctgttgaaacatgttctttaatactataaactggtatatgcttcattatgatttattttaaggcttataatctcgtttaaaaggatagttgatgaaaaaatatttaggaatgctgcttttgtataaccttgggaaatggtggcagcaacccttaatggaggctgcggccgtcatttggttaggttatgcactataccaatttgtacgccatcacagtggccaggatgaagtggatgatactagccagaaccaagcacttttggatagcgcgcaagtcaagtatcgctacataacagcagctcattttgaacagaccatgaatcaattagataaacctggtgtccttggtgatgtattggtcgctgaaatgccacaaggacgacctattggggccattgcgcttctgacgaccggcatgttaagggctcggcaagcaatggttcaaaccggtatcgttaagcgcagtgatgaacagcgtaaacgggcttacacgccaggttatgatttagtgagccacgactatgtaaaggtagctggacaaaaaattaatttgtatcatcgcacacatttgttgccttttcgttttacgctttcagaaggcgataatattgatgggttattatttactggtacagcacatttgaatcatggtgatcgcccccaaatgaattacttgatgatgagtaatcaagcacgggtaaatcaattgtatagcatttatcaaaataaccattatcgcttggtcctaaataatgttcaagtgccaggggaaccagtagggacgcattattcgttagacgattttgaacaattagccacacgaattattttgagcaaaaagcaagctgaaaccgaattcaaatatgaagctagctgtcactatgatactgatggccttatcccccaatcgattacagttaatttgtgggatttgacccatcaggttcttgcttttactgtgacgcttcctaatgaagtctagttagttattgatggttaaaataaaaatattaatattatatttagttgttagaagataactagtatggtttattaacccgctattgaacaaggaactggcttaaatcatatcaaatcagatatgattttttgacgcaattattaataattataaaaatattgatattgttgctaaatattaaagtggataatgctcgaaatagtcaacgacactaatctttttattaagttgagggaaattggttgaaatatagtttttaatactataaactgtttataacgctttaagtcatagtgagttgaagtttaattaaaggaatgttgcttaatcaactgaattcatagtataagatgaataaattatgttttgattactttatttttatttatttaaagtaagtgaacagattgtggtaagttgtcttagttatggatgagtggcgaggcagtgacatataggaggaaaaacatggatgcaactaataagtccgacctaatcggtgattcatggtccgattttatggaattcgcaggattatatcgttggctcatcaataatttgagcgaatcgatgaaccgagaaagtcaaaaatatggattatcatttgatcaattcttagtgatgcacgagattaagaataacaataacgaaacaactaatagtgctttagcagataagatgcaagttagtcgttctgcgatttcacgccaatgtcgttcattacgaaagatggcttttatcgctgaacaatcagatgaaaaagatcaacggattcgtcgggtacatttaactgaaaaaggattacaagtttacaatcacttgctttactactatttagatctatacaacgatcttaaaaacgaagtgggcaaggataaagttgatgctactatcggtcaaagtaaagaaatctttgaacgaatggtgtcaatgaaccttaatcgaccagacgcaaaataattgaaaggaatcttggtaaggatttttaccagattcctttttttgtacggtcaaatcagtatcgagtcttgcttttctttgttagaatagaggaagcgactttacgaatttaggaggaacacgatgggttctcaaaaaagtttattattaattgatggtaatagtgtggcattccgggctttttacgcgatgcaccaagtgttagatagttttaccaatcaagatgggttacataccaacgccatttatgcgtttaaaaatatgctcgatattatcttgaaacgatttgaaccaacacatgttttagtggcctttgatgcgggcaaaacaacttttagaacggcacaatttgccgattataagggtgggcgttctaagacaccaccagaattgacggaacagtttccatatatcaaggaactattgcacgcttatggtattcagacggctgaattagcgaactatgaagctgatgatattatcgggacgttagcctgccaagcagaacaagacggctttgtcgtcaatattgtaacaggagatcgcgatttaacccagttaacgacggacaaaacgactgtcaacatcacggtcaaaggtgtcaacgatacagaagcctacacgccagcacacgtcaaagaaaaattaggcttagcacctagtcaaatcgtagacttaaaaggtttgatgggcgacacttctgataattatccgggtgtcacaaaggtcggcgagaagacagcgctgaaactcttaacggaatttgggagcatcgaaggggtctacgaaaatgtcgatgcaatgaaaaagagtaagatgaaggaacatctgattgaagatcgtgatcaagcctttatgagcaaaaaattggcgacaattttacgggatgcaccgatcgaaacgacgttagcggacatcacgtatgaaggtcccaacatcgatacgttgattgctttttatcaagaaatgaactttcaaaactttttaaagcaattgaacgtgacaccagaagcggttgaaccggcggaaaactatcaatatactgttttgacgttggataatttagaaaccgttcaagcgattaaaacaccggttgccttcggggttgaaatgttaaccgataattatcacacagccgatttaattggtttttatatcggcgcaccagatcattggtatgtcagtgatgatgttgcactactagctgaaccagtattgaaggattggttggaagatgcgagtcatcctaaagcagtcttcgatgtcaaacggacgcaagtcgcagctaatcgattaggtgttcatttagcgggcgttaattttgatttattattagcatcttatttattgaatacgacgaataacagcaacgatttagggacggtcgctaatttacacgagtatcaaaatgtgcaaacagacgaggccgtttatgggaaaggtgctaaacgggctgttccaactgagccagctttgttgtatcaacatttggttcaaaaagcggcagccatttatcatttacaaccacaacttgaagaacaattgaaggaacatcaacaattcgatctctttacggatatggaattaccattggcccttgtattggcgcaaatggaaataaccgggattcgggtcgatgccagtcgtctccaacaaatggggtcagaattcagccaaaccttgaagatcttggaagaaaaagtttacgctgaagctggcgaaaccttcaacattaactcacctaagcaactgggcgttattttatttgaaaaaatgggcttaccagtgattaagaagacgaagacgggctattcaaccgctgttgatgtacttgaacaattacggaaggatgcaccaattgtccaaacaattttggattatcgtcaaattgccaagattcaatcaacgtatgtcgaagggttattgaaatcaatccatcaagataataaagtccatacgcgttacttacaaaccttgacgcaaactggccgtttatcatcggttgatcctaacctacaaaacattccagttcgtttggcagaaggccgcaagattcgccaagcctttgtcccaagtcacccagactggcaaatgtttgcttctgattactcacaaatcgaattacgagtattagcacacatctcaggggatgccaacatgcaagaagcctttaaagaagaccgggatattcatgcaaatacagcgatgaaaatctttggcttaaacagtgccgatgaagtgacaccagatatgcggcgccaagctaaagctacgaatttcgggattgtttacgggattagtgattatggcttatctcaaaatatcggcatttcgcggcaagaagccaaacgttttatcgacgcttatttcgaacaatatccaggtgttcaacaattcatggttgatattgttaaaaaagcgcgtgaagaaggctatgtcgaaacgcttttccaccgtcgtcgttatttaccagatattcacgctaagaactttaacctccgttcttttgcagaacggacagcgatgaatacgccaattcaaggtagtgctgcggatattatcaaggtggcgatgattttaatgcaacaagaattgaagaaggcgaacttgcaagccagaatgttattacaagttcatgatgaattgatttttgaagcaccaactgaagaaataccaatcttacaaaaattagtcccaagtgtgatggattcggccgttaagttagcggtgccattgaaggtcgaaagtggttttggcccaacttggtacgatattaagaaataaggtgacggaaaatgcctgaattaccagaagtcgaaaatgtccgccggggacttgaaaccttagcggttggtaaaactgtttcagcaatcgatattcgctggtcgaaaattattgttaatccagatgaagtctttactgctggattagtaggtcaacagattactgctgttgatcggcgggggaaatatttgctaattcgttttggagaacagctaactgttgtcagccatctgcgaatggaaggtaagtatgaagtggttgccaaggaggcaccgatttccaaacatacgcacgtgatttttgaattcacagatgggcaacagatgcgctacctagatacgcggaagtttgggcgaatgcagttgattgagaccggtcaggaaaatacggtagctggcttgaaggacctaggaccggaaccaacaccgtcgacttttttaaaggcggacttctatcaacggttgcaaaaacatcacaaagctatcaagccattgttattggatcaaaaggttgtgaccggtctaggcaatatttatgtcgatgaaacgttgtggttaagccatattcatccagaaacaccagccaatgacttgacgcgtgctgaaacggatcgcctccacgatgagattattgctgaattagaactagcgattaatcatggtgggacaacggttaacacgttcttgaacgcgaccggtcatgctggcgccttccaagaaatgctgcatgtttacggcaaaaaaggggttccttgcgaacgatgtgggacaccaatcgagaaaattaaagtggcacagcggggaacgcatttttgtccaaagtgtcagattaaaaggaatgcaaaataatgacttatttcctaggcttaactggtggtattgctaccggtaaaacaacagtttcgcaaatgctagcgcaacaaggtattcctattattgatggggatcaagtcgcacaccaagtgttggctaataatcaaagtgttcaagcacaaattcaagccacttttgggaagcagcttgtacaagatggtcaggtcgatcgggcagctttgggcaaattggtctttggtaatcaagccgcattagcgcaactcaacgcgattacagcaccggtcattcgggagacgattatgaccgagatggctcaggcaaaagcgcaccaagtaccgctagttgttttggacttaccgttgttatatgaacagcactacgaaacggtttgcgacggggtattagtcatttatttgccggttgaaaaacaactagcgcgattaagggctaggaaccaattaagtcgcgaagatgctttgaaacggattaacagtcaagcatcattggctgaaaaacgggatagagcagacttcgtgattgataaccaaggttcactggatcaattggaagcccaattaaagacagttttggaaggcgtgcgccataagtcgggtatgtcctgaggattaacacagaatggtgaatgattgctgcaagcaatcgtttgacattcagggttaaccggaagaatatgacttatagaacacgtttataccaccaatgttcggataccgaaaaggagctgaagacaaaattacttttgtcccagctccttttttgatctatttgcaccatgcagtaaatgcgcaaaattaacctggtgcgatagtactctgaaacgtggactaccaacctgattcctgtggttagcgatgtcagtcaaacaaccgactgcatcggttattcgcctaacgctgctaatcctcagaatcaacccggttggtaacgcacgctggttaaagtgcctctcgcatcaactttttgtgctttaccacggtgtgcgaacaatcgactgtgtcgcttattcacaccactcagtaaatactcaaaagtaacccggtgcgataggcactctgttgcatgtcatgttataatattgttatactgtctgtttagaatagtaaaatacaattaatattccttaaattaaaagataagaaggtgtctttatgctatgtccacattgccatcaaaatagttcacgggtaattgatagtcgaccaacagatgaaggacgcgttattcggcgtcgtcgcgaatgcgaaaattgtcaattccggtttacaacttttgaaagggtggagcaaacaccgttattagtcattaagaaaaatgggacccgtgaagagtttaaccgcgataaattattacgtggtttaatccgggctgccgaaaagcgacctgttacaatggaacaaatgactgaaattgttgatgaagttgaaaataaaatcagggcattaggcgaaaacgaagtgtcgtcacaagctgtcggcgaatacgtcatggccgttttaccaggcgtcgacgagattgcttatattcgttttgctagtgtctaccgtcaatttaaagacatgaatgtctttatggcggaattgcaagaaatgatgaaaaaagaaaaggccaaagaccaagattagtcgaaaggagttagcggatgtcagatgcatttgattatttaagtcctaaagatgggtttatggtgacaaaagctaactatttgagcgattttgatcaaacagtcgtcacctatttataccaaccactgatgggggctgtcgcgtacagtctctatcttttgttatggagccaatcaacacaggccaagagtcaaacgactttccaaacgcatgcgaccttgttgaatttattaggggttgatttgccggctttttatgacgcgcgcaataagttagaagcgttaggtttaatgcggacttatcagaagaataacaatacgggccgcaatttggtgtatgaattatacgcaccaatgcagccacatattttcttcaatgatgatttgttgagtgtcattttatacgaatcagtcggtgagaagcggtttattgaattgagagagcattttaaactacaaccagtgcgctctaaggaatacgaagaggtcacgaagaacttcttgacggttttccacgttcaaaatgatcatttaacaacggcccctacggcagttgctgaggcacaaagtacgtatcaacaaaaaaaggcgcaaaaaccaagtttcacgtcagttgagttgcgcacttttgattgggctttgttgcaagaagtggttgctcagcaccaaattgatacggatgaaattctacgtaatgagcaacggttatttaatttacactatttctacggcttagacgaaatggaattaggacgcttaatcggcctcaccatggatgtggctgatagtcgggttaatatggatgcattggaacagaatgttttgaataactatacgcgccggcataacgttcaaaataacagcgaacaaccagctaagaagccactcgagaccctccaaaaagaatggcaaaaagcgggttttaacgaaaaagagatgcagtggttaactgaaagtcagcagtatttgccaattgattacttagaatatctcaagcagaaaaatcatggctttgttgccaaaaatgagattcgcgcattacgggatttgcaaaatcgttatattttcaacaacgatgttttaaatattttagtggtttatattattagccagtatgagggcttaacgcaagccttattggatcggattgccaaccaatgggcgcaacaaggtgttaagaccccagctgacgccattttacaaattcgtgatttccaaaccaaacaagaaacaaagcaaactaaacgacaatcacgttatcaagccaagactaaacaagagactgtaccgaagtgggctaagtctgattatcaagcgccacaaaccacatcaagtaaggctgatcagcaagaaattgatcaattactcaagaaaatccgtgaagggcgggaatcataatggaaaatatgggcaaagatttaaccgactatatgaaccggcaacgcctgaatcaacgctttaataaattagttgaagaagccttacaagatcctgatgtgcaggcctttattcaggctaatcaggccgccctatcacaagaaaccgtggcgcgcagtgccgctaagatctatgaatacgtcaatggaaaaaagaaaattttaaacggtgaaacaacgttggcccctggctacgcccctaaattggtgttgagtaaccactttatcgatgtcagttatgaaccaacggcggacttagtacaaaagcgcgcacaagccgaattaaaagcgcgtgtaaaatcaattaacatgcctaaagacattgttgaagcaagccttgcgcactatgatgcgagtgagcgccaagtaccgctgattgaagcgttgaagtttgttgaagcttatcggcaagcgcccaccgattttcatcaaggcttatatttaagcggccagtttggtgttggtaagacttatttactgggcgcgatcgctaatgagttagcactgcaaggctttgaaacaacgttaatccattttccaacctttgcagttgagatgaaaaatgcgattggtcaaaataacgtcctcgaaaaggtcaaccaaatcaaaaaagcaccaattctaatgattgacgatatcggtgcggatgccttgagtgcttgggtacgggatgaagtattaggcattattttacaataccggatgcaagaacaactagccactttcttcagttctaattttacgatgaacgaactggagaaacatttgacaaccagccagcgtggcgatgaggagccggtgaaggccggccgaattatgcaacgggtgcggtatttagcccgtgaggttgaggtcagtggtcaaaatagacgcttacaatcaaattagggcttgcgtaaagtttgattaagtgttttaatagagtcaatcaacgatgaaagataccttttaaatggcgagattgatcagggagaaaaacataactgaaagtttttcataaggacatttaattgaccactttctagaggcttaagttagtcgggtcgtttccgttaaagacgcttaaagttggagaatcatcatctgattctcaatctgggtggaaccgcgaaatcaattcgtccctgaggtgcatatttgtatgtgtctcaggggctttttttattgttgattacaaaaataagaaggagtgttcaagcatggcagaaattcaattaacttttccagatggtgctcaaaaaacatttgagcaagcaaccagtttactagacgttgcaaaatcaatcagtacgagcttggcaaaaaaggcaatcgccggcaaatttaacggtgaagtggttgatttacaacaaccacttttggaagacggggcaatcgaaatcatcactaaagatgatcaagcggttaacctaactgccacttggcatactgcagctttcgtattagctgctactttaagtcaacactatccagaaatgcaatttggtgaagtaatggcaaccgaagatggtttctattacgatacagataatgaagctggccaagttgctgtaacagatttaccagaaatcaaaacagaaatggctaaattaatccaatcaggtgaagcaatttcacgtgtcagtgtttcaaaagatgacgctaagaaattatttgccggccaaacttataaacttgctttattagacgaagttgaagctgaccaagttttagtttaccaattaggtgactactcagactttagcttagcaccaatgttaggtaaagtcagtgacgttaaattcttcgaattattatcagttgctggtgcttattggcaaggtaaatcaagtaaccaaatgttacaacggatttacgggacagcttatcctaaacaagaagaacttgatgctgatttgaaacgtcgtcaagaagctaaggaacgcgatcaccgtgttatcggtaatcaattagacttattcttcgttgatcctaaggttggcgcaggccttccttactggttaccaaatggtgctacaattcgtcgttcaattgaacgttacatcattgacaaagaagttgctaatggttacgaacatgtttacacaccaatcttggctaacttagacttgtacaaacaatcaggtcactgggatcactatcgtgaagacatgttcccaccaatggacatgggcgatggcgaaatgcttgaattacgtccaatgaactgcccatcacatatccaagtttacaaacatcacccacgctcataccgtgaattaccaattcggattgctgaacttggtatgatgcaccgttatgaaaaatcaggtgcactttcaggcttacaacgtgtccgtgaaatgactttaaatgatggtcacacattcgttcgtcctgatcaaattcaagatgaatttaaatcaatcttagggctaatgatcgatgtttatgctgactttaacatcaatgattacacattccgtctaagttatcgcgatcctgctaacacagaaaaatacttcgacgatgatgaaatgtggaacaaagcacaagcgatgttgaagggcgctatggatgatcttggcttagactatgtcgaagctgaaggcgaagctgctttctacggtcctaaattagacgttcaaacaaagacggctatggggaatgaagaaacactttcaacaatccaattagacttcatgttgccagaacgttttgacctacactatgttggtgaagatggcgaaatgcatcggccagttatgattcaccgtggtttagtgtcaacaatggaacgtttcacagcttacttaacagaaatctacaagggcgctttcccaacatggttagcaccaacacaagctgttatcattccagttaagaacgatcttcactatgattacgctaaaaacatcaaagatgaaatgatcaaacgcggtttacgtgttcggatcgatgatcgtaatgaaaaaatgggttataagattcgtgaagcccaaacaagcaagattccatatacattagttgttggggatcaagaacttgcacaagcaacagtttctgtccgtaaatacggtgaagaaaatgcggttgaagaagcctcagacatgtttatcaacgcaatcgtagcagaagttggtaactatagccgagacggcaaacaacacacaaagaagattaatctataaagagtgcgttacaactggttgattctgagcatttgcacagcctagcgaataagcggtatttaccgcctatttgataggtgacgcaaagcgcaggaatcaagttgtaaaagcacgtttcaaaaagagtgcgttcaaagcgggtagcttctgagaattagcatagttagacgaataattgacaaagtcgattatttgactaacggcgctaaacgcaggaagttgctttgaaaagcacgtttcaaaaaagagtgcgttcaaagtggtaacttctgaggattagcattcttaaaaaggcgttaaatcaatttattttgatttaacgcctttttttacgtcttttagttgtgcacaattaaaaaagcggtataataatagttgtaaacgatttcataattgataattaatgggggttttattatggcaactgaaaaatatatggcaggttctgcagaaaaagcattggatattatcaatctctatgaattagaggaagccgctggtaaagttgtccctaagggcggttttgggtatatctatagtggtgcaggtgacctctataccattaatgaaaatatcacagcatttaatcataaatatatcgcaccacgggtcttacaagatattgaaaatccggacacatcaacagaaatttttggtgatcacttaacgtcaccaattattatggcacccgttgcagcgcacaaattagtcaatacacaaggtgaagcagcaactgccaaaggggtggcggaatacggctcaatcttaaccatgagttcatttgcctcagcaagcattgatgatatggcaacggcagctgatggtggcccacaatggttccaactttatatgagtaaagacaatgatattaaccgtaaaattttagatgaagcgatggcccacaacgtgaaagcaattgttttaacagctgacgcaaccgttggtggtaatcgtgaaactgacaaacgtaatcattttacattcccagttggtttgccaattgttgaagcctatcaaacaggtgtcgggcaaacaatggacgccgtttataagtcagctaaacaacgtttgaatccaaaggatgttgaatttatttctgaatacacccacttaccagtctttgtgaagggtgttcaaacagcagaagatgttgaaatcgcccttcaagcaggcgctaaaggaatttgggtttcaaatcacggcggtcgtcaattagatggtggccctgcagcctttgactcattacacgtagtcgcaaaagccgttaataagcgggtgccaatcgtctttgatagtggcgttcgtcgtggccaacacgtcttcaaggctttagcagaaggggcagatatcgttgcaattggccgtcctgtgatctatggtttagcattaggtggcagtatcggtgttaagaacgtctttgaatatttacaaagggaattggaactcgttatgcaacttgctggtacgcataatattgatgaagtgaaagcaacacaattaatcgataatcactatggtaattaatttctgaaaatcagttgggattaccttgactttaaaacttaaaccgagtatacttattttcgttgagaaataaagcagaagttcccgcttctcgccttagtagacacttgatgtctctgggctgatagtttctaattcggacgaattaagttatcgaatagcgggcctttctgttgaaggggccgtttttttggtgcttagctgcattttctctctaaattttatggaggtgaagagtcatagcaaaagatttgatggttaacgatggtattcgtgcacgagaattacgtttgattgctcaagatggcgaacaacttggtatcaagagtacacaggatgcaattgcattagctgaacaagctaatatggatgttgtcttggtttcaccaaacgcaaaaccacccgttgctcgtattatggactatggtaagtaccgtttcgagcttcaaaagaaacaacgtgatgctcgtaagaagcagaaaaccattagcctcaaagaggttcgtcttagtcccacaattgaacaaaatgactttaatactaagttgaacaatgcacgtaagttccttggcaagggcgataaagtgaaagcttctattcgtttcaagggccgagcaattacgcataaagaaattggtcaacgtgtattagaaagacttgctaaagaaacagaggacatcgctaaagttacagcacgtcctaaaatggatggccgtagcatgttcttaatgttagaaccgcttaaggaccaaaaataaaaatctgtttctgatttattaggaggaaatatcatgccaaaatttaagacacaccgtgcttcagcaaaacgttttaaacgtacaggtaatggcggcctaaaacgcagccacgcctacacaagtcaccgtttccacggtaagactaagaaacaacgtcgtcaattaagaaaatctggaatggtttcaaatagcgatatgagacgtatccgtcaaatgttatcaggccttaaataagccatagcattttcggattcaagtaaaaattagatcactacaacaacgctttgacgttgtttgttattcaaggaggaaattcttatgccacgtgttaaaggtggaacagtgacgcgcaaacgtcgtaaaaagattttaaaattagccaagggttatcgcggcgctaaacatttattattcaaatcagcaaatactcaagtaatggtttcataccgttacgcattccgtgatcgtcgtcaacgtaaacgtgacttccgtaagttatggattgctcgtatcaacgctgctgctcgtatgaacgatatgtcatacagccaattaatgcacggtttaagagtcgctgaaatcgacatgaaccgtaagatgttagctgacttagctgttaacgatgctgctgcattcacatcagttgttgaagctgctaaagctgcattaaacaaataattaataagaccaaaaaagagtctgggacaaaacttcgttttgttcgagactctttctttataaattgcattatttttaacgggaaacgatgattttacctggtgcatggtgactttctaaaagttgatggcctttgatgacgccttcaagtgtgaaaggtaattcttcaaggactgtgacgtgtaataggccttgatcaataagttcacttaaatcttgaagggctgtcaaatcaggatagtcacggcgaggatagacagattggtaagtgacaccagccacttgttctgcttcacttggcatgattgttgtacttgcaaagaaaccatctggttggacaagttcattcaataattcagttgattttggatcgcggctgaggttgacagcaatcttggccgtttgtttaaagtgacttaaatcgcctggttggtcgtaggcgattgtttcttgaacaccaaatgatcgtaaataatcaaggtttgaactgtgtgcaatcgcaatgacggttaaatgagcagctaggctgagttgagtgagtaaactcccaacagccccgctagcgcccatgatagcgattgtatcgccatgtttaaagttcgtaaagtgcattaacgtgttataagcggtaataccagcacttgcgagaccagcagcttcagcgatgctgaggctaacaggtttgcgaatgattttgttggttgaagctgtgacgaattcgctataaccgccgagtgggcgatgattaataactagttcaccaatacgataatcggtaacgtctgcgccaagcattacaatttcaccaaccacatctgtcccagggacgattggcattggtaaaggacgcactgtttgttgtgaaccggttctaagggcaacatcgtaagggttaagcccaaacgcaagtactttaatcaagacttgatttgcctttggcactggttgcgattgattcaatgtttcaaaaacatccggtccgccaaaatgattaaacccaaatttttccataacaacacatcctctcaatttctttaaacgtaccagaaaagcgcttaaatgtcgattagtttgacttagattgtgaagaaagtgttgagaaaattgaaaagcaattagaatgggcaaataattaacctcgtaaaggtgcaatttattactaaataacctataattagtcagtgactagattaaaggagacaaatgcatgctaaagaattttaagccaacttggatggttaatgcaatctatgacttaacaccagaacaactcaaagcacaaggcattaaagccgttttgacggatcttgataacaccttaattgcttggaataacccaaacggcacgccgcaactcaaagaatggttagcacaaatgcaagccgctgggattacggtcatggtggtttcaaataacaatcaacaacgggtccaacacgcgttggccgaattacaattaccttttatcgccagagctaataagccattggcgactgggattgtgaaagctaagaagcaactcggtttatcacgtcacgaagtggtgatggttggggatcaattgattaccgatatgcacgcaggcaatattgccggtgtccggacaatcctagtgaaaccaattattgatagtgacgcttggaatacttctattaatcgcttttttgaaaaatatattatgcaacaactactaaaaaaacacgcagatttaacttggcgggaggatttaaatgactgaagaacaacaacagactgaagaagcactattttgtattggttgcggtgctcagattcaaacgactgataaggaagcactaggctatacccctaattctgcccttaaaaaaggattggaaacgggtcagctttattgccaacgctgtttcagattgcgccattataatgaaatcagtgatatcaagttaaacgatgatgattttttagcgttactcaaccaaatcggtgatagtgatgctttaatcgtcaacgttgtggatatctttgactttaacgggagcttgattcccggattacaccgtttcatcggtgataacccagtaatcttggtcggcaataaggtcgatatcttaccaacagcccttaatcctaaccgcgtcatcaactggattcaaaaagaagccaaggaacatggcttacatccaattgaaaccatgttggtcagcgctaaaaaagggaactcagtcgatgacttactagcagttatcgaacgggaacgaaaaggtcgcgacgtatacgtggttggggtaactaacgttggtaaatcaacgctaattaaccgcatcatcaaacaaactgggattttggacaacgacgtgattacaacgtcacaattcccaggaacaacgttggatcggatcgatattccattatatgaagatgatcatgctttaattgatacaccagggattatccatgcgcaacaaatggcgcattacttacatgataaggatcttcgtttgattgccccacaaaagcaaatcaagcctaaagtttatcaattaaatgaacaacaaacgctatttttaggcggcttggcacgttttgattatcttcaagggcctcgtcacggttttgttggttactttgataatgaactttacatccacagaacaaaattagaaaatgcggataatttctatgttagacagttaggtgatttattacagccacctcatccagaagacttagcggattttccagacttacaacgttatgaattttcaacaaaagaaaaaagtgatttagtcttcgccggtttaggctggattacattaccagaaaatgtggttgtcgcagggtacgcaccaaaaggcgtttcagtgatgattagaaaagcacttatttaggttagcgaagggagtaacgcgcgtgttaacaggtaaacaaaagcactatcttagaggattagcgcaaacaacaaaaccattattccaattaggtaagaatggtttgtcagaagcttatttcgaacaaatcgaagaagctatcgaaaaacgagaattagtcaagattaatttattgcaaacaacagaggtaacggttgatgaattagccaacttcttgaagcaacatgataatcggattgaaattgcccaaaaaattggccggacattggtcatttataaggcatcacgtaaagaaaaataccaaaaaatttcaacgattgttactaagctcggacgttaataaggcggtgatgagatgcaaaatgcaacattaaaaaaagtgcacggtgtatcagagtcaaaaccgtctgtcttagttgtcgaagataaacaacgacaacaggtcggtatcatgggtggcacctttaacccaccacatttaggccatctaatcatggctgaacaagtggggacgcaattaggtttggataaagttttattcatgccggatgcgaccccgccacatgttgataccaaaaaaacgttacccgccaaacatcgcgttgagatggtcaaacgggcgattgccgataatccactttttgaattatcaatggctgaaattgaacgcggtggtgtcagttatacgtatgacacaattgtggcgttaaagaaacaataccccaatacggatttttatttcatcatcggtggcgatatggtcgattatttaccgacttggcaccggattgatgacttagtgcaactcgtgcagtttgttggcattcaacgaacaggctatagtcgccaaacaccttatccagtattgtgggttgatgcaccacttgtcgatattagttcaactcagattcgcaataaggtgcaacagggttgttcaattcgctacttagtaccgactaaagtggcggattatattgaggaagaagggttataccgtgagtgattttacttaccaagaaaatattgtgccgtattcacgcgcagaactagcgcaaaaagtggctgccaatttatctgagggccgttttcaacattgtttacgcgttgaagagactgcgattaagctcgctgagcttaatcatgccgatgttgaacgggcagcgattgctggtttggtgcatgattatgccaagcaattaccagacgaagtctttattgaagcgattcatgaagctggctttgatccggaattgttacaatacggtaatgcaatttggcacggtgtcgtcggtgcttacttcatcgaacgtgacttaggcattcacgacgaaacaattttaaacgcggtccgtcgccacacgattggcgccccagagatgacagtcattgatcaaatcttatttgttgctgacttcatcgaaccgggtcgtgattttccaggcgtggcacaagcacgggaaacagccttcgctgatttagcggctggtgtgcggtttgaaattttaaatacgttgacctttttaattgaagggcaaaagaagatttatcctaaaacaattgacacatacaatgcttgggtgccaactcaagcccattaaaggagaacattagtgaaaagtttagacttattaaaaattgctgttaaagcagcagacggtaaaagagcagaagatattgtggcattaaacatggaagggatcagtttattagctgattatttcgtaatgatgactggttcttcagaacgccaattagacgccattgtggacgctattgaagatgctgaagaagaagctggtttgatggttaagaaaattgaaggtaaaaaaggttcacgttggatcttaatggattttggcgaccttgtcatcaatgttttcatgccagaagaacgtgcattatacaaccttgaaaaattatgggatgaagcaccaatggttgatgtttcggaatggttaacagaagaatgatttaccaaagtttcgcaacggtctatgaccgcttaatggaccatgaattatatggtcaatggcgcgattacacattacaaacgttgcaaaatcaacaccgcgttttagagctcgcttgtggggccggcgatttagcgatccttttaaaacaagcaggactggacgttgttggcttggacctttcaacagaaatgttgagtattgcgtctgaaaaagcgactgaagcgggcgttagtttcccattacttcaaggcgacatgttagatcttagtgaagtgggcacatttgatgcgatcacttgttttgacgattcaatctgctacatgcaagatttggatcaggtccaacaagtctttaaacaggtttatcaacaactggcagagggcggtcaattcttatttgatgcgcattcactctatcaaatggacgttttattccccggttttatgtataatgatcggaccgaagagacggcctttatgtggacgagttatgaaggcgaagtgcctcattcagttgaacatgatttaaccttcttcgtttgggacgaacaacttggtggttaccaagaattaaacgaattacatcatgaacggacgtatccaatggctgactttgtgacggctttagaagcggtgggctttaaacaaattaaagtcagcgctgattttggtcaagaagcggttcaagatgatagtgttcgttggttctttagcgcagttaaatagaggttagtatgagaattacaggaattattgcggagtacaatccgctacataatgggcatatctatcaacttcaacaggcgcgtcagcaatccaaagcggatttagtgattgtctgcatgagcgggaattacgttcagcgtgggcaagcagcccttttggataagtggacgcgtgccgaattagcgttgcaaaatggggcggatatggtggtcgaattgccatttgtgagtgcggtgcaaccagctgatcgttttgcgactggggcagtgcaactgttagcggcacttggctgtcaaacaattgcctttggcagtgagcaaccggcatttgattatcaacaagcggggcagcagattatcgacttacctgagcaatctgctgcttttgttgactaccaaaaaacgtacgcaacgcagcttaacgagttctatcaagaacagttatccttgcagattgatcaaccaaaccatctattagggatcagttacgcggtcgctaatacacgtctagcgcaaccgttaaacttattggctatcaagcgagaacaagcacaacatggggaccagaccatttcaacggcaccgtatgcaagtgcgagtgcgattcgcaagattgtgacgcaaggcaccgatttagcagctttacaacatgttgtcccggcagaaaccctagcagccttagctgatagtacgattcttacagaagaccaactatggccactcttaaaataccgcatcgagagtctgtcactaggacaattacggcaggtctaccagatgtcagagggcttggaataccgtttcaaaaaggtaattcacaaagccaatagttataccgacttattacaagctttaaaaacaaaacgatatacgtatgcccggctccaacgggtttgcctatatgtcttattaaacattcagccagcggatattcaacaggggcttgcacggccttatattcgcttgttgggctttaatgacattgggcagcaacacttacaccagttgaagaagacgactgatttacccattatcagtaaggtttccgccaaaatgggggctgaaactggtttattgggcttagaagtccgcgttgatcgcttacgagaacaatttggctggcagtcgcaaaactttgccagacaaccgattttttatcatggaaaggatgaagcgcattgttaaaatggtcagtacaagcattacaaaagcatcgtgaacatccgcttgcttttgaagaaacagttgatttagaaaaacaactccacgaaagagaaaatgatgttttgtcagcaacgccgtttgtcatcagcggtcaattaaccgttgatcgacgggccatcatcgctgacttacacgtggtcggagaactaaccgttccatcaacacggagtttgaatccggtggcacttccacttgattttacgttcactgaaatttatgttgatccaacggacgaagaattatcacgtttccctgatgaggacatgttgttcccattagaaggtgaaatgttagacatgcaagtggcggttgaagatcatatcctattgcacattcccagtcatattttgacaccggaagaagaaaatgaagacgtgatgccaacgggccaagcttggtcagttatctctgaagaagaatacgctaagcaacaggcagaagaggctgaagcccctaatccagaattagctaagctcaaagcattgttagaagcacaagaaaacgacgccgattaagacgggcgtcttttttttgcactaatttataaaatggaccggcccaaatgggttaaaatgcttttctttagtgaacaattctgctaacataatcagagtaagtgtgttaagcaatttgagtagataatacaccattaaattagaacttattaggaggccttttacatgagtcaaacacaaatcggtgttatcgggatggcagttatgggcaagaacttagcattgaatattgaaagccgcggttatacagttgccatttataaccggactggtgctaagacagaagctgtgatgcaagatcatagcgaaaagaaattagttgcaagttacacaatcgcagattttgttaaatcattagaaaaaccacgtcggattatcttgatggttaaagctggtgccggtacagatgccgttatcaacgaattgttacctttattagataagggcgacattttaattgatggtgggaacaccttcttcggcgatacaattcgtcggaatgccgaattagataaatcaggtatcaactttattggtatgggtgtttctggtggcgaattaggtgccctagaaggtccttcaatgatgccaggtggtcaaaaagaagcttatgacttagttgcccctatcttggaacaaatgtcagctaaagctgaagacggccaaccatgtgtcacatacatcggccctaacggtgctggtcactatgtcaaaatggtccacaatgggattgaatatggcgacatggaattaatctcagaaagttataacttattaagaaacgttgttggtttatctgtagaagaaatcgctgatgtcttcaaagaatggaaccacggcgaattagacagttacttgatggaaatcacagctgacatcttgacacgtaaagacgatttaggcacagacaagccaatcgtagacgttatcttagatgctgctggtaacaaaggaactggtaagtggagttcacaaagtgcccttgaattaggtgtgccacaatcattgattacagaatcagtctatgcacgttatatctcagcaatgaaggacgaacgtgttgctgcaagcaagattttacctgccccaacggttgctaagttaactgaagataagaaagaattgatcgaaaaaattcgtcaagcactttacttcagtaagatcatgagctacgcacaaggtttcgaacaaatgcgtgtggcttcagatcaatatgactggtcattaaactacggcgaaatcgctaaaatctggcgtgctggctgtatcattcgtgctcgtttcttacaaaagattacggatgcctttgataagaaagctgacttaaataacttattattggatgattacttcttagatattactaagaactatcaaggtgctgttcgggatgttgctgcattggcaatccaacaaggtgtgcctgctcctggtttaacagctgctatcacatactttgattcatatcgttcagaagtattgcctgctaacttaatccaagcacaacgcgattactttggtgcccatacttacgaacggacagaccgtgaaggcatcttccattatacatggtacaaagaacaataatttttaatcgaatctaaagaatccagacgaaagcctcattttcgtctggatttttttgaggcgttaccaactgcgccattgtggtgcttaaataattagccgtgcgtgctttgtagagagatttgttagttatttatgaggaactatgctaaaatggatgagtaagtggctactactgacgagttgattcttagagaattcttatctacgaagaacgttcagcgtggacattaaatttcttttttttagggagtgactaaatgagtcgcatattaattattgaagatgagaaaaatttagcccggtttgttgagcttgaattaaagcacgaaggctatgagaccgaagtacatttcaatgggcgtactggtttagaagctgctttaaatgaagactgggattcaattttattggatctaatgttacctgaattaaacgggttagaagtttgccgacgggttcgacaagttaaaaatacaccgattatcatgatgacagcgcgcgattccgtcattgatcgggtatcagggctcgatcatggtgctgacgattatatcgttaaaccatttgcgattgaagaacttttggctcgtctacgcgccttgttacgccggatcgatattgaaggcgaacataacgctgccaaacaaacgacggtgacttatcgcgatttaacagtcgagaaggaaaaccgaatcgttcgtcgtggtgatgatattattgaattaacgaaacgtgaatacgaattactattaaccttaatggaaaacgtcaacgtggttttagcgcgggatgtcttgttaagcaaggtctggggttatgattccgacgttgaaacgaacgtggtcgatgtttatattcgttatttacggaataaaatcgatcgaacgggcgaacaaagctatattcaaaccgttcggggaactggatatgtgatgcgctcgtgataacaaatgacttagaaacacccagtgaaaataataataagggtcgtaaaatatcgttaaaggtgaaatgggcagctgcagttgggttggccatttttatcacctttgcgattttttcaattgtgattttcagtagtatttcgaacattttattgcataaggaagttgataatgttcatgatacggttactgtgatccagcaacgattggcccacccggaaaaagtgttgaccgcggactttgttacgggtcaactcgacccagcgccgagacaatcaaaagcaatctatcaagattccgtcttaatgcgcttagcgcaacaggatacgacggttaaagtttatgatcaaaatcggcaagggttatttgcctcgcgtggtcgggctacgtcttttccaaagcaagataccgatgtgttaaagcgggagcatatctttgggaagattcatttaattgggattcgtcctattaaggcggccaatacgaatcgcaccattggatatgttgaggttaccaacaacttgcgtgattataatcatgcgatgctggaattacggatcgttttagtggtcgttgtgctatttgcaatgttgtttagtgctgtgattggttacttattagccaaccagttcttgcggccgattgaagcaatgaaacaaaccatcgaagcaattaacgttgaacccaattcggatgtccgtattccagaaacgggtcgcagccaagacgaactctcggacttagtcgtggcctttaacgaaatgttaaaccggattcagcactactttgaacagcaagaccaatttgtgagtgatgtctcccatgaattacggacaccggttgcgattattgaagggcatcttcaattgttgaatcgttgggggaaagatgatccggaagttttatcggaatctctggcagcttcactgcaagaaattttacggatgaagaatttgatccaagaaatgctagatttaacgcgggccgatcaagcggtgaccgaaggcacgtcagaagtgacggatgttggtaaggttgtcttacaaaactaccataactttgagatgctttatccggaattcacgtttattttggatgatgatttgcacggtcaagcgttggtcaaaattaaccggaatcatctggaacaaatcatgattattctattggataatgcgattaagtactcaacaacccgtaaggaaattcatattgcggtggccaacgacgagcgttacgcgcaagttgccgttcaagattttggtgagggaatttcggaagaagataagaagaaagtcttccaccgtttctaccgggttgataaggctcggagtcgggaaaaaggcggtaatggtttaggattagccattgcccaacaattagtcgaaggctacgatggtaatgtctcacttgaaagtagtgtcggacacggatcagtcttccggattgaattaccactcgttagagaaacaaagaccacagcagaagatgataattaaaaaagaggcacagacaaaatcattttgtctgtgcctcttttagtatttctaattatgcttgtggtttgtggcgttgtttgcctgagttacgtttgcctgtttcagaaggcgtcgttgccttattagtgtgcgttggttctgttgttacaggtgtttcagtcgctttagcagctgcttttttagtgaacatgtcttttgtcacaactgtgacaattggtttttctttaatttcttgatcaatgcgtttcttaacacgtggcatgatgatgaaggttgtgatcatttgttgaataatcataatcatcccgccggcaaggaagtaaagtgctaacccagctggtgcgaataacgaaatgaagaatgtaatcgcaggactcatgaggacggttgtttgcatttgtttcttttgttcagcgggcatcccaacaagtgagagggcgctttgaccaacgtaaaagagggtcgcgataatggtgataatgatattaggttgacctaagccaatcccgaagaagtgactacttgaaatttctggtgagtattgaatggcttggtacaaaccagagaagattggtaattgaattaataaggttaagcaaccaaggctaggcatcatacttgaatcattttccttataaaccttcatcattaattggcttaattcggctttttcttcaggtgttgtcgcaaccttttgttgtgcttgtacaatatctaattgtggtttcaaacgacgcgttttttcttgttgcgcagtcattttgtttgattggttaagcattaatgggagtaaaatcatccgcaccacgaaggtgatgatgatgattgcccagccgtaaccattgattccgccgaagaaatcagcgatgcgttccataatatgttgtaatgggacggcgatgtatttgtacgatgagccatagatgaagccggttgggactttaggatggctactcattttttgtggcatacagccggatagaaataatgtaacggtcattgctagcatcgcaagtgttgcgaagcgttttgaatttttcataaatttagccctttcaagataagtttcaataagtgtaactatactgtaaggggctacgtttttcaaccgacaactgaaaatttatgacacgctgacacatctttcaggggtgtttggatgacgcggtcaacgcgaccactgggtgtcggtgacgctttgacggcaccgatgaattgttccaaaagggcgtcggggcccatcgcaataattttgacagagccatcgggttgattggcaaccgtgccagtaatccttaatcgatcagcgaccagtttagtcatccaccggaaaccaacaccttgaacccgaccaaaaacatctaattggacagctttttgcatataaatcacctccagtctattgtaatcgcttgacggtgatttggcgattaaaaagcaagacgagggtcccatagaatttacagcccaagtcgcgtataatagaaagtactaaatagactggagcacaacatggaatacattcaatcgaaccaaaatactaagattaaagcggctaagaaattaaccgttaagaaaaaccaacgtaaagaaaatacttatttattagaaggctggcatttagtgcaagaagccatccaaaataaagcggtgattcgccaagtctttgcgacagaaaaatacgttgatgaacgcgccttacgtggtttatacgacgatacttttgaaatcgcacctgaagtagcccaacaccttagcgaaacaaaagcccctcaagggatttttgccgttgttgaaatgtcagaaacaccaatgcctgaaaaattaacgggtcgttacttgttattagacgccgttcaagatcctggtaatatcgggacaatgattcggacagctgatgctgctggctttgccggtgtcgttttagggaacggtagtgttgatctatacaatcctaaattattgcggtcaatgcaaggcagtcacttccatttaccaatttatcaaggtaacttaatggactggatgaagaaattcaattcacaagacgtgccagtttatgggacagaattaaacccagaagccatcagttatcaagatgtacctaaggcagctgacatggctttgatcttaggtaatgaaggcaatggtgttgcaaaagacgtcttagctgccacaacacaaaacctttatattccaattcctgggaatgcagaatcattgaatgtcgcagtcgctgctgggattttaatgtttaaattaatcgaaggctaattcttaagttttcttaatgaagcgttttttttgaagcgaatgacttcttttttgatcaaaaagctgttattcttgtggcagaatttgaatttaaatcagtcaggagtctttgaatgaacgcaacagctaagtggtatcaagatgcagattatatggcattgattgccgatttgttagaaaaagaagaagttcaaaaattagcaaattacacacagcatcatcattcggatcgtttagaacattcacttagtgtttcttatcgaagctacgagattgccaagaagtggcatcttaacgtccgctcagttgcccgcgcaggcttattacatgatttgttctactacgactggcgtgacacgaagtttgatcttgggacgcatgcttatgtgcacccacggattgcactccggaacgctgagaaactaaccgaattgtcaccaatggaaaaagatattattgtcaaacatatgtggggggcgacagttagccatccaaaatatcgggagagttatatcgtgtcattggtcgatgactattgtgcggtaaccgaattttgctcaccattttggacaaaattcaaacaaaaggtattacatcaatcaattgcgacacaaactaacaaatagaagatgtgccaatcctcaaggttgctttttgcaacctttttgagtacacttattaataataagtgtgaggtgagtaatgatgagtattgtaaaagagaatgctatttctgactgtcaagagaccttccaactctgtcctaaatttgaaaaaacattctcaattttagggaagaaatggaatggtctgatcattgatgtattattagaagggggcgcacagcgcttcaagcatttggttcatagtgtgcccaagtgcagtgatcgcgtgttagttgaacgcttgaaggaattagaacaagcgggaatcgttgctcgcataacgagtgctgattcatcgttgattgaatatcaactaactgaaaaaggcgaatcgctagcacctgttatggatgccgttcataattggtctgaccaatggtgcgatacgaacgactagttgcttaatcattgaatttacgctaaaataaagtttatagacaaagatgaaaaagagtaacctaacaaccaactttcagggagaataatcatagactgcaagttattcagttgagtttaggtgaagttcactttcagagttgaccgttgagtccggtattgcccgttacgcaaacttgagtgtatgactaggtcataaactagggtggtaccgcgaagcttcgtcccttttgaggacgaggctttttttgttggcaaaaataaggaggaaatcaaatgtcattgaaggaacagttggaacgcttgcaacaaaagagtttgcaagatatccaaaaagttgttgatttagatgcattgaatcagattcgagtagaagtactcggtaagaaggggcccattacggaagttttgcgtggtatgcgggacttaagtaatgaagaacggcccaaagtaggggcttttgcaaacgaaattaagggcgatttggcccaagccattgaagcgcgcaaagcagaattagaagctaaaaaagaagccgctcaattagcgcacgaaacaattgacgttaccttaccaggtcaacccgttaaaaagggaacaccgcacgttttaacccaagtgattgatgatttagaagatttattcatcgggatgggctaccaagtcgttgctggttttgaagtggaagatgaaaaacataactttgagatgttaaacatgcctgctgatcaccccgctcgtgatatgcaagatacgttctacattacaaaagacacgttgatgcggacccatatgtctcctaatgaagcacgtgatcttgaaagccatgactttgctaacggcccaatcaagatgattagtcccggtcgcgtttaccgtcgtgatacagatgatgcaacgcattcacatcagttctaccaaatggaaggtcaagtgattgataagaacattacgatggctgacttaaaagggactttagaatatacaattcaccacatttttggtgaagatcgtaatctacgtttccgaccaagttacttcccatttacggaaccttctgtcgaagtggatatctcatgtttccgttgtaatggcgaaggctgtaacgtctgcaaacaaactggctggattgaagttttaggtgctgggatgacgcatccaaacgttttaaaagccggtggtgttgatccagaagtttacggtggctttgcctttggacttgggatcgatcgttttgcaatgttgaaatatggtgtggatgatattcggaacttctatttaaacgatgtccgattcttaaatcaattcacacaggagggttaagcaatgaaagtatcttataactggttaaaagactatttagatttaacaactgcgccagaagcacttgcagaaaaaattacccgaacagggatcgaagtcgcagacgttgcgcaaatgagtgctggcttgaaaaaaattgttgtgggacacgttttaagttgcgaaccacatcctgattcagatcacctacacatttgtgaagttgatgttggtgaagaagaacccttccaaattgtctgtggcgcccctaatgtggctgctggtcaatacgtgattgtggctttacctaactcacgaattgcagacaacgtgaagattaaaaaaggtaagatgcgtggcgttgtttcaatgggcatgatctgtggcctacaagaaattggttttgccgatagcgttgtacctaaagcatatgttgatggcatcttcgttttcccagaagcaattgcaccgggtactgaagtttacgaagcacttgggatgactgattacattatcgatcttgatttaacagctaaccgggccgatgcgcttgggattcacggtgtggctcatgaagtggcagccattgaatcattgacacctcattttgaagacgtagctgtttcagaaagtgatgttcaaacaaaagatcaagtgagcgctcaagtggctgatgaccaattagcccctagttatcacttgcgcatgttacaaaacgtcacagtccaaccaagtccattgtggttacaaacacggctttggaatgctggtattcgccccatcaataaccttgttgatgtgacgaactacatgatgttaacgtacggtcaacccttacatgcttttgatgccgatactttaactggcgatcacaaacaaattgaagtccgtttagctaaaacaggcgaaaaattaacgactcttgatgaagcagaacatgatttaaccaatgaagatattgttatcacggatggcaaccaaccaatcgcattagctggtgttatgggtggtttcaattcagaaattacggctaatactaaaaatgtgattatcgaagctgctatttttgccccaacggctgttcggaaaacggcacaacgccataacttacgttcagatgcctcatcacgttttgaaaaaggtgtgaatgtcgctgatgttcaagtggctttagatgccgccgcagccatgatggctgaattgggtgctggtcaagtcactgctggggtcgtgagcccaacaaacttggcaccacaacctaaagtaattcaaatcgattcagcacgggtcaaccgtgtattgggcactgacatgagtgttcaaacgatgattgatttacttgaacgttttggttttgaagtggctaacaacgctgaccaattgacggtgacaattcctgcccgtcgttgggatattgaaatccaagcagacgtgattgaagaaatcgctcgtttatacggttacgataatttaccaagtacattaccaactggcgatatgacaactggtgctttgacaaccgaacaaaaggcgcttcgccggacacgtcatacgcttgaaggcgctggtttaacccaagcaattagttatgccttgacgactgaagaaaaagcagggcaatttgcattagctgctaaacaaacagcgactgttcttgattggccaatgacgcaagatcatgcttatttacgaatgaatctggttactgggttactcgatgatgcggcctacaacgtcgcacggaaacaaacagacttagcattgtacgaacaaggccgggtctttttacaacacgctgatcaagcgcgtcctaatgaagtcgaatatgttgctggtttaatgagcggtaatcgccaagtcaaatcatggcaagaagcggcagcaccagtggatttctatacaatcaagggtgttgttgataccttgatggctagctataacttgcaagaagcagttgcctaccaagcaacagatgcttatccagagatgcatccgggtcggactgccgctatttatgtcggtgaaacattcatcggaattgttggtcaaatccatcctaaaattgcgaaagccacacatttaaaagaaacttatatttttgaattagacttggctaaaatcttagaattacaacgtcaaacaattattgccaaaccagcacctaagttcccagaagtgacacgggatattgccttacaagtgcctgaagcagttacgaatgctgaattggtcaacgcaatcaaggaaaaaggcggccgttatcttgtttcagtatcattattcgacgtttatgcgggcagccatatcgaagctggcgagaagtcaatggcttatacattgacatatctcaatgaagacgctactttaacagaagaagaagttaacgcggcctttgaaaaagttgtggcgcacttagtggcaactttccaagcgaaagtccgttaatctacgaatctttaatgcaatttttgaataatttggtataatgttttaaggattgtatttaaaagagcaattaggaggtcatcctttgaagaatgctgatcaaaaggagccagttgatcaaaaaacggctgaagaacggcaatacgctgaacgacgggctgaaaaaaaagcagctaataaaattgtctattggattattagtatcctgatagccttagtcatcattattggttttatggggtatcgctttgtccaatcatcgttgaaaccttataacacaaatgctaaacaagaaattacggttcagattcctaacggatcaaccaacaaggaaattgccgctatcttacaagataagcgactcattcggaatgcatctgtctttaactattacgtgaagacacataactttaccgatttccaagctggttatcacgttttgaaacaatcaatgagcttagataagattattgctaaccttcaaaaagaagggacgccaacccgtcctcgcgattcgaaggggaaggtcttagtcaaagaaggggttacccttgaacagattgcaaccgcagtcggcaaagagacgaaattctcgaaagctgctttcatgaagcaagttcaagataagaagttcttggcaagcctcgagaagagatacccacaacttttatcatcaacgatggctaagaaggatgttcgttatcacttagaaggttatctcttcccagcaacgtatgaagtctataaagatagtacgttgaaagaattgattactgaaatggtgaaaacaactgatcaaaacttacaaccatattatgcaacaatgaagaacaagaaattatctgttcaacaaacattaacgttggcctcattagttgaacgtgaaggggtgactgcaagcgatcgtcaaaagattgctggggtcttcttcaaccgtttagacattgatatgccaatccaatcagatatttcggtaatgtacgcattgaatacgcataagacacatctctataataaagatactaaagtcgactcaccttataacctctatgttcactcaggttatgggccaggaccatttaactcgccaagtttacaatctataacggcggtcttaaacccagctgatcgtgatcaaggttatctctactttgtggctaacttgaagacgggtaaggtttattactcgaagactttcgagcaacatacagacacaacgagctcgattgaagattagtaatgtatcatagaagtcgacctcaagcggggtcgacttctgtctgtccaaaaagaagttgagaaaaaggagcgtctaatgacgagtcaaaaaaaagcacccataattatcggcgtaactggtggttcaggtagtggcaaaaccactgttagccaggcaatcgcacaaaaatttgcaaaccattcggtgatgttattaccacaggatgcgtattataaacatcaagatggttcgtttgaagaacgccaagaaaccaactatgatcatccagatgcgtttgatactgatttattgatcgaacaagcaaccatgttgaaaaatcatcaatcaattgaacaacctgtttatgattataaaatccacaaccggacagatgaagttgtccatgtggaaccacaagatgtcattatcttggaaggaattttggtattagcggatgcccggttacgtgatttgatggacatcaaagtttacgttgatacggatgatgatattcgtttattaagacggatgagtcgtgatatggagagtcggggacgttcatttgatgatattgtgatgcaatatctcaagacagttaaacctatgttccacgaatttattgaaccaacaaaacggtatgcagatttaatcgtgcccgaaggtggtaacaaccgagtggcgattgatctcttggtaacgaagattcaatctattctaaatatgaatgactaataattaaacgaggtgactataatggcacaaaaaaaattcccaatgactgcagaaggtaaagaaaacctagctaaagaacttgaaaacttaaaaatggttaaacgaccagaagtaatcgatcggattaagattgcacgtagtttcggtgatttatcagaaaactctgaatacgaatctgctaaagatgaacaaagctcacttgaaacacggatcgttgaagttgaaaacatgcttcgttttgctgaagtgattgatgttgacaatattgctgttgacgaaattgctgttggtaaaacagtcagcttcacagatgatgaagacggcgaagaagaaacttatcaaatcgttggtgctgcagaatctgacccatttaacggtaagatttcaaatgactcaccaattgcccaagcattagttggcaaacacgttggtgacaaagtcgtagttcaaacaccaggcggcgacatgcacgtaaccattacggaagttaaatagagtgcgtcattaagcgggtgcaacctgaggattagcctaatagggtgaataagcgacaatagtcgattatttgacctatgtagctaaccggaaggttgtgcttaatgaaagcacgtttcaaaaatagagtgctgactcaaacgggttggctttgaggattaacctaaaaccggggattatggcacacttggccacggttcccggtttgtagttaaccggaaaagacagtttgagaagcacgtttcaaaaatagcctactaactaaaagagccgggacaaagtcaatttgtcccggctcttttttagttgaacttttatagtctgaacgtatttttgtcagcagttattcaccgagctgtgctaatgctcaaagtcaaagcgtttcaaacgcactctgattttaaacgtgcttttgtcagtaactttctgcgctttaccaaacttgtcaaaccggtgattgcatcaccaattcgacaagttctgcaaatactcaaaagttaaccactgacaacgcactcttttacgttaatcagcccctagactgattggcgtttaatgattaagcttgtataatgattttaaagagttgagaggagaccaaattatgccgtttttctggcggatttttttaatcgtagaagcaatcatttttggcacctttatttggcagattattacgtatccgccttatttagtctatattattatcgggattctcggattagtctgggctaataaacgccgaatggctaataagcggggcttttggacgacgtttctaacgatgatgagtagtgtggcggtcgcagtgccattattgattaatttttcattatggttgatgttgattgtcgcagttgtttttatggcaatcaaccatagtcatgcaagtcattttaacaatcgtaatttgaataacctatttgaaaatgcaccatggcgcaaaaagaatttcataccgattaatacgactgcccctaagccaaaacaagcgaccgtgacccggcataattggtttggtcatcagacgattgggacgaatatttttgaatgggacgatattaactttgccgtcttagccggtgatacaattattgatttgggcagtacgattttgcctaaggatgataatcatattgttattcgtaaagggtttggtaaaacgcggattttagtcccagtgggcaccgggatttatttagaccattctgcgatgttaggaactgtcacaattgatgaacaacaatatcacttgaaaaatgagtcacttcagttgtatagtaccaattatgatgaagaaagtcgccatctgaaaattatcacgaatgtcgtgattggcgatcttgaggtgattctagtatgagtaaactcgcgcgcagttttgtgtttattagtaccggattgttgacgcttctgttttcagtggcgttattttttgcgtatttctatagtattcaacaagatcaatggttattgagcctagcgacggttcgctttttctatgtaccgttaattgcctatattattgtggcagcgttaattgtagcgacggttgtgacgagtattttttatctcgttttacgtcaacaggtctcacatacggagagccaattgcaatatttagtttccggacagtacgaatcaccggtttttaaacaaataaatgccgataatggtaatttttcgatgacaatcgaacaaactgttgaacaattacggcaaaaaatgatacgcttacaacgagacattcaaagttatagtgatcggccacctgtgattgcgggtgagacaaaagaagaaattttggcccaagagcggcaccgtctagctcgcgagttgcatgattccgttagtcagcagttatttgcggcgacgatgatgttatcggcgttaagcgaagtggcccaaaaacaagcggataatccgcagctgttacaatcgctaacgacggttgaacgtgtcttgaacgatgcacaatcagagatgcgagcattgttgttacatctacggccagtgacgttggaaggtaagagtttacgcgatgggattattcagttattgaatgaattgaagactaaaattgcggtggaaattacttgggatattgataatgtcaccctaccaagtgggattgaggacaatctgtttagaattgtccaagaattattatcaaatactttgcggcatgcgaaggctcaagaaattgaagtctatttgaaaaaaatcggtcagagcgtcttattgaaagtaatggacgatggccagggctttgatccaaaggttgcgcaaaaggctggcagttacggtttaaataacattacagagcgagcacaatcggttggcggaacggctaagattattagtttacccaaccaaggcacaagcgttgaaattagagtaccacttttgaaggagcgaaattaaagtgataaaagtattgattgtagatgaccacgagatggttcgattggggatttcaacttatttaggggtgcaagacgatttagaagtagtcgatcaagcggttaatggtcgtgaaggtgtcgaaaaggcattggcactacggccagatgcgattttaatggatctcgtcatgcctgaaatggatgggattgaagccactaagacgattctaaaggcttggccccaagccaagattattattctaactagttttattgatgacgaaaaagtctacccagcaatcgaagctggtgcggcaagttacatattaaaaacgtcgacggccgaggaaattgccaacacgattcggaaaacaactgctggtcaatcggttttagaacctgaagtcactaacaagatgatgaatcgtatgacgcatcaggcagaaacaaagttatacgaagatttaacgaaccgtgaacgagaagttctaggcttgattgccaagggccgcagtaatcaagaaattgcggatgaattattcatcacgcttaaaacggttaagacgcatgtttccaatattttagcgaagttacaagtcgacgatcggacgcaggccgcaatttatgccatcaagcaccaattagtggattaatttaaaaatttgggaggttatgaagatgcaaattacagttacagatgcagcaagtcattggtttcaagaggaactcgctttaaaaccaggagaagcagtgcgctttttcggtaaggtttacggtcaaacggctgttcatgacggcttttcattaggaatggagcgggctgaagtcagtcaaccgattggtcaagttgaaaaagacgggattacttatttcgccagtgattcggatgcttggttttttgctgactatgacctagcaattgattatgatgcgcaattagacgaaccgaaatatgctttcccaaaacattgagaattgatgttaaaaaagacctgagacaaaattacttttgtcccaggtctttttttatgcttagagcaaataaatattatgatgacgctggatatgttaagttggaagtagactttatgagaggatgaggacattgtatctagccattaaggaaatgaagcatgctaaattgcggtattcattaattatttttacgctttttttgattgcctatttaatttattttttaacgggattggcgtatgggttggccaacaataaccggtcagcaattgatcattgggacgccaatcgaatcgtgattagtcagtatgcgaataaaaatttggcggcttccgagttacaaacgggatcactgccaacgattaaaggggaccaacaagatcgcgcctatttaggccagatgatgggggttgttagtggttcgcaaatcgaaaaacaaaatacgagtgtttttggcattgatttcgatgcttttctaaaaccgacattaacgaagggccgcttaccaaaagcgacccgcgaagtggctgtcgatgatagtctccaagggattaagctcaatcaggagattaaattaaacgggcgttctgaaaaatataaggtagttgggttaacaaacgatcaccggtataacacgcaaccggtcacgtatttgagcttaaaggcttttcgtcagatgcgctatggcccagcggctagcaatcagattaatgccgtcgttttaagagacggcgcctctattaaaaaggacgaccaattaaccaatctaacgattaaacagttaatcgataatattccgggctatgggccacaagtgaaaaccttcgcgctgatgattggtgctttattaatcattgttgccttcattgtggggatttttatgtatattatcaccattgaaaaaacgacggtttatggtgtcatgcgaacccaagggatatcaggtggtcaattagtggccagtttgatgtggcaatcactcttcctaggcttaattggcgtgggtgctggtttcattggcaacttgctaacaaccttggtattaccagtcagtgtgccgtatgcgaataatagtttattaatcggtgccttttcagcggtgctattgctgatgacggtggtcggcgcactattttcaatttggcggattctaaaaattgatccgctagatgcgattggaggggcttaatatgagtttaatgcgcttagaacagattactaaacgatttggtagtggtgatcagcagacgaccgcccttaagcaaatcgatttaacgattgaaaaagggcaatttattggtttgacagggccctctggttcagggaaaaccaccttgctaacgattatgggcagcttgcaaagtcctagtgatgggcagctttattttaaggatcaagaaattggacacttaacggaaaaggaacggtcggctttgcggtttaacgattttggctttatcttgcaaagttcaaacctcgtttcctttttaacggtcagtgaacaatttgaattagttgatcgactccggaaaacgccgagtccgaataaggcagacgaccttttgaaggaactaggggtattggaccaacgccgtcaatatccggctagcctatcaggtgggcagcgccaacgtgttgcgattgcccgcgcgctttatggccaaccagcgttaatctttgctgatgaaccgactgccagcttggatagcaaacgtgccattcaggttgctgagcagttatcggcgattactaaaaaaacgggtcagacgattgtaatggtttcgcacgatgaacgcgttttagcctatacggatcaagtttacatcatgcgtgatggtcaattgactgataaatgataatcataaactttgacgaatggttgagtaattcgttaccatgaagatatactaatcagtaaggagtgttttaaatgacaaataaagagaagttagatggcatgaaagatcaagttactggtaaagttcaagaaacagccggtaaagtaacaggcgacaaagaaacagaagcaaagggtaatgccaagggtatgatgggcaaggctaaagaaaaattagcggaagctaaggataaagtcgctgaaaagacaaatgaagtcatcgacgatgtcaaagaaaaaatggataaataagtctaactaaaaagtgattctacgcatccgttatggacgagtagaatcacttttttaatgttcagtatcgattttaacgaccacgcgaccagcttgtttagttggcgtgcttagttcagttacgagttctgagaatgcgatattgcgaattaacggccaggtttgcggtttgaagttagtggctaacaactgccagatttctttgcgatccttacggggataattgaccgaatcgatgccaaccagtgttacccctcgtaaaatgaaggggaagaccgttgttgcaagtttaaagcctgcagcgttaccacaagctgcgactaagccatcttgggccatataagggagaatgtgtgctaagacatcaccgccaagtgtgtcgattacaccagtataggattgatgggccaatggtttgagcggggcgtttaagagatcatcagttgcaatgacatgtttggcacccagttgggttaagtaatctgcttggctgagatcgcgagtcgtcgctgtgatgttggtgaaaccaagttgtgctaacattgtcagtgcatagctgccaacgccaccagttgcacctgtgattagtagtggcgtatcgtgatcccgtgtaaaaggttgtctaagaattttagtaagggcgatagccgcggtgaacccggccgtcccaagttgcattatttcttggggtgttagttcaattggacatttcaagagccattcgctagggactttgacgtattgtgcataaccgccgtcgatactaataccggtaccataacctgtacataagacccattcaccagcctcgaagaacggattgtccgagttgaccacggtgccgacaaaatcaacgccgggtgttgcgggatagtttttaagaacgccacttttagcattcatagtgaggcggtctttgtaattgatatctgagtaggcaactttgattaagacgccttcttttggtaaatcaggtgtcaattttgttgcgtactgagcagtaacagtttcgttgtcgtgcgttaaaactaaagcttgataagcgaccataatataaaacctcatttccgatagtttagttagcttcattatacaacaaaacaaggtttgaattggcatactaagctggaaacggtataattgaagggatatttattaacttatcgagccattatttataatagtatgtagaggggattacgaaaatgcagcaaccaatggtggaattcaaaaacgtcatcaagaagtatgacgataatcaaatcctaaagggaattgatatggcactagaaaaaggtaagttttataccttattggggccctcaggctgtggtaagacaacaattctgagaattattgctggttttacaaatgcctcttctggggatgttttatttgaaggaaaacggatgaatgatttgccggctaataagcgtcaggtcaatactgtttttcaagattatgcgctatttccccatctgaatgttttcgataatgttgcctttgggttaaatttacgtaaagttaacaaaaaagacgttgaaaaaaaggtgattgaagcactgaaacttgtgcggttgggtggctatgaacaccgtgaaattagtgaactatcaggtgggcaacaacaacgggtggcaattgcccgtgctttagccaacgagcctaaagtcctcctattagacgaaccgttatcagcgttagatatgaaattaagaaaagcaatgcaatatgaattacgtgatctccaacaacgattagggattaccttcttgtttgtgacgcatgatcaagaagaagcacttgcaatgagtgatgaaatctttgttatgaacgaggggaatgtccttcaaagcgggacccccgttgatatttacgatgaaccaattaatcactttgtcgcagatttcattggggaaagtaatatattgcccgggaaaatggttgctgattatcaagtagaaattgtcggtaaagtttttgaatgcgctgatgcagggatgaaacctaatgaagccgttgaaattgtgttacgtccagaagatttggatatcgtagccgtcaaccaaggacagttagtcgtgaccgttgatacgcaattattccgaggggattattatgaaattaccgcctatgatgacgatcgtaaccggtggttaattcattcgactaacccagctaaagatggccaacaagttggcttgttcttcgaaccagaagacgttcatgttatgcgttttggcgaatctgaagaagattttgacgcgcgtcttgaaagttatgaagaggaggattaaggcggcttatgcgaaaaaaacaattaatttattatttaccttacgcgctgtggcttttgttattcgtgctagcgccggtcgctttaatcgtttatcaatccttctttgatattaataaccatgtgacgctccaaaattatgtcacttattttgaatccggcacttatttgaagatgacgcttaattcactgtggtatgcttttttgattacgttaattacgttattaattagttatccaacagcttattggctccatcaaaccaagcataagcaattgtggctattactcattattttaccaacttggattaatctcttgttaaaagcatacgcctttatcgggattttcagtcaagatggcgccatcaatcatttcttagggtggtttgggattggaccgcaacagattttattcaccaattttagtttcttggtggtggcgacctatattgaaattccatttatgattttaccgattttcaatagtttggaagaattaaatccttctttagtgaatgcgagtcgcgatttaggggccagtaattggcagaccttttcaaaagtcgtgttacccttgacgatggccggtgttaaagcaggtgtccaagccatcttcatcccatcattatcactattcatgttaacgcgtttaatcgggggtaaccgggtgattactttagggaccgcgattgaagaacatttcctaacgacgatgaattggggcatgggttcgacaatcggggttgtcttgattgtcgcaatgggccttatcatgatgttaaccggtgaaaagaagacgaagaagaaggtgacgatgaaatgaaacaagctgagattaaatggcaacatgtttggttaattgtcgtcttcattttgttgtacgcaccgattttttatctgattttctattctttcagtagcggcgacaatatgaacggctttaaatcgttcacttggcaaaattaccaagatttatttgcagatacacggatgattgagattgtcttagaaacactattaattgcgattttatcatcactatgtgccacgatcattgggacctttggcgcgttggggatttattccaccaagcaacggcggttaagaaatattattttatctttgaataatatcttgatggtctcacccgatgttatcattggggccagcttcttgattttcttcacgttcttgggccttgggctagggtttgggtcagttttactgagtcatattgccttctcaattccaattgtggttttgatggttctgcctaaattaaacgaaatgcgacctgcattagttgatgcggcgcgtgatttaggtgcgactgattggcaagtacttagcaaggtaattttaccgtatattagttcaggcatttttgccggctttttcatggcttttacctactcacttgatgactttgcggtgaccttcttcgttaccggcaacggttttgaaacgttgtccgttgagatttattcacgagctcgacaagggattagtttagaaattaacgcgctatcagccttgatgtttgtcttctcactgttgttagtgggtggctattacttgttaaatcaacgcaatcaagcgcataaagcaaaacggaagcagaaaatgggggcgccagttaaatgaataaattaggacgattaacgttagcaatcctcgtcgtctgtgcggccctttggttcgggacggttcagctacaaaaatcgcaaggttatacgaaaaataatacattaaccctctataattggggcgattatatcgacccatcattaattaagaagtttgaaaagcaaactggctatcacgtttcggttgaaacctttgatagtaatgaagcaatgtacactaaaattaaacaaggtggcacggcttacgatttggcagttcccagtgaatacatgattgaaaaaatgcggaaggccaatcttttgaaaccaatcgatcattcacgcttaaccggctttcaaaacattggcaaaccttatttgaatcaaccgtttgacccgggcaataaatactcactcccttatttctggggaacattaggtattatctataatgatcaattagtcgatcagcccttaacacattggtccgatttatggcaagcaaaatatcgcggtaaaatcatggtcgtcgatagtgcgcgggacatgatggcggtgggtttgattgaaaatggtcagtccgttaatagtaccaacccagtggcgttaaaagccgctaaagcccgtcttgatcagatggcacccaatgttaaggcgattgttgccgatgaaattaagatgtacatggttcaaaatgaagcgagtgtcgctgtgacctggtccggtgaagcggctgaaatgttagccaataacaaacacttgcactatgtgatcccagaagaggggagtaacgtttggtttgataacctcgtgattccaaagacagctaaacatactaaagcagcttatgcctttttaaacttcatgttagaacctaagaatgcggcgcaaaatgcggaatacattggctattcaacaccgaatatgccggctaaagcgttattgccggcagcaacccggaataatccagcctattacccaagtcaaaaagtgctgaataaactacaagtttatagtgatttatcacctgagatggttggtctatacaacgatttattcctagagtttaagatgcaacattaattgtgaagctatcagcaaacaaaaaggcttcatggtataatggaaaaagaaattttttgaatggaggtcaccatgtcagttgattgggcacaattgttaacctggcgcatgttagccaatattttggatatcattgtggtctggtattttatttataaattaatcatgttgattcggggcacgaaagccgtgcagcttttcaaaggcatcatggtcattgccatcatcaagattgtcagttggtaccttggtctaagaaccgtttcgtacatcatggatcaatttatcagttggattgtgattgcgttaatcgtcatcttccaaccagaaattcgtcgtggtttggaacatatcgggcgtggttcgctattgatgcggggcaacaatcctaagcttgaaaaagaaaataacttgattaaagccttagataaggcgattcagtacatgtccaagcggcgaattggggcattgattaccattcagatgaataccgggttagaagattatattgaaaccgggattgatttggatgctgatgtgacgggggaattattgattaatatctttattcccaacacgccactgcatgatggggccgttattattcgcgaggataagattgccgttgcggcggcttacttgccactgtcagaaagtaatctaattcctaaggaactggggacgcggcatcgtgcggctgtcgggattagtgaagtaacggacgcgttgacgatcgttgtttctgaagaaaccggtggtgtcacgttaaccaagaataacgaattgatgcgcgacttaacgcgggaagattacttgaaatacttaaactcacacttaattacgcaagaagaagataaggtgagcctattgcaagaattcgtcgacggcttcaaaaaaggaggccataaataatgaaaaactttatagaagggccttggttgtaccggatattagcgcttttcttatcgttactcctttttagctacgttaatattgataaaattaataccacgcgccaaattaataataacaacacacaaatgttagcgacgcgcagtgaaactgtgaaggtgccgttgcaaatcaatgcggataccgataaatactttattaccggttatcctcaaaaagttaaagtaacgctatcaggtcctaatgcgttgattacatctgctgttaatacgttgaatttccgagtgattggcgatttaacgaagctaggtgctgggacgcatacggttaaattaacacaaaccgggattaacaaagacatcaaagtgaagattgaaccagctacaattaaggttaaaattgaacataaattgactaaggaattcccagtacaagttaacgtcaaggaagaaaatttggcgactggttatagtattggcaatcctaagattagtcaagatgtcgtacaagttagtggagccaaggcagctgttaattcagttgcgcgagtggtagcgacaattgatcctgataaagggaccaaaaatgatattaacgaagaaacgcttctacaagcggttgatcgtaatggtaagacggtgaatgttttaatttcaccccaaactgttaatattaagattgccgttcagatgaataaaaagacggtcccactcagtttacaaaaaacgggtgaaaagagcggctaccagtacacgttgagttcagaaacggaacaggtaacggtgtacgggaagaagcaaactttggcaaccttaacggacttaccactaacggtcgatatgacggatatcactaaagatacgacacgcacggtgactttgacgcttccaagtggggtctatgacagtcatcctaaacaggtaaaggtcaatattaaggttacagcaccaactgggatgacgactagtcgtacggaaacaacaacgcagtcttcatcagagtcaacgacttcaatgagtcaaagccaagtgcaaagtagcagtagtagtacgacaagtgagagtcagacgactgataataatcaaaccagtgagtcaagtagtagtagtgacaactcaagcagtacagcaaatacgaacgaatcataaaacgtttaagaagatggaatggagataattagacatgacaaaatattttggaactgacggtgtacgtggcgttgctaatctagaattaagcccagaaatggcatttaaattaggtcgcgctggcggctacgttttaacaaaacacgctgataaaaaccaacggcctaaagtgttagttgctcgcgatacacggatttcaggacaaatgttggaacaatctttaatttctggcttattgtcagtcgggattgaagtcctatcattaggcgtcatcacaacgccagcggttgcttatttaattaaggttcaagaagcaagtgccggtatcatgatttctgcatcacataaccccgctatttataatgggattaaattcttcggagctgatggttataaattacctgatgccactgaagaagaaattgaagctattttagatgcaccagaagatacattaccacgtccagaaggtgaaggccttgggactgttgaagaatatccagaaggtgctttgaaatatacacaattcttggaacatacaattcctgatgatttagaaggcttaaaagtggctgttgatggcgctaacggctcaacaagtggattgattagccgggtctttgctgatttagaaactgatttcacaacaactgctacccatcctaatggcttaaatatcaacgatggtgtgggttcaacccatcctgaaaaccttgttaaaaaggtcttagaatcaggcgctgatatgggcttagcttttgatggtgacggtgatcggtgtatcgcagttgatgaattagggaacattattgatggcgacaagatcatgtttatcttgggtcactatctttctgaaaaaggtcgtttgaaacaagatacaattgtcacaacagtgatgagtaacattggcttgtataaagcaattgaagctaatggaatgaaatctgcccaaacagacgttggtgatcgccacgtcgttgaagaaatgcgcgaaaaaggttttaacttaggtggcgaacaatctggccatatcattatttttgactaccataatactggtgacgggatgttaactgggattcaattaatgaatgtcatgaaacaaaccggtaagaaattatcagaattggcagccccagttcaaacttacccacaaaaattagttaacttaacagttaaggacaaggatgcttggttaacaaacgataagatccaagccgctattgatactgttgaaaaagaaatgaacggtgatggccgcgtcttggtccgtcctagtgggacagaaccactattacgtgtcatgtgtgaagccgctactgaagaaaaggttaaccaatatgcggaccaaattgccgcagtcgttcaatctgaaattggtgaataattaaaaaagagtgctttgggttgcgggtagcaactgagcattaacctaatttgacgaattagcgataaaatcactgatttggcaaatatcgttaagcgcagaaggcagtttcgaaaagcacgtttaaacgataaaatttcgacgattcaaaaagagcgtaagacaaaagtaattttgtcttacgctctttttttgtgtccatgattttaatgccaagtgacttgttgatacatcacaaaaatgaaagtaatcaacaaggtaatcgcagcggagatgtaataccactctttaacaagaatcatcggcgcctcggttaacgagaagttgcggcgatagcgtttgatactgaggatgctgaattcattgacgattatcaataagagtggttcgaggagcaatatggagcgactaccagatgaatcaacgatgttatcagcggtgatatgtaaggcgacggtctgaggggcaaccaagatgaaacccaacccgactagtaacccgattagcgaaatgaggcgaagcgttagaatagcttttttcatgaccaagactcccgattaagttctgaataggtctagtatagcataatttaacaggattcattcaggactataccaatgttttatattgatatataccaataaaaatgttgacaataaaaacgttggtgttattatatttaagtgttataccaattaaatttaaaaataaaaccaaagagagaaagaggaatttgatatgtgtggaattgtcggtgtgattggtaaagaagatacgactgaaattttattaaatggtttagaaaaattagcttatcggggttatgattcagctgggatttatgttaatagtcaaagtggtcgcgattatttggttaaagaaccaggtaaaattagtgttttaaaagccgcagttggtcctgaagtacaggggacaattggtgttggtcatacacgttgggcaacgcatggtgttgcaagtcaagcaaacgctcacccacacgtttcagaagatggccgtttctacttggtccacaacggcgttttaacaaactacgctgaattacgtgcaacttatttaagccaagtcaactttgcgagtgaaacagatactgaagtggcggttcaattaatcgcttatttagctaagacagaacaattttcagctaaggaagctttccgcaaggccctaacgttgattgaaggctcgtacgcctttgtcatgattgatcggaacgatccagagacgttatacgtggctaagaataaatcaccattattaattggtgtcggcgctgatttcaacgttgtttgttcagatgctttagcaatgttaaacgaaaccaaagactttattgaaattcacgaccgcgaaatggtcactcttaaaaaggataaggttgagattgaagatttagatgggactttcattcatcgtgatagttaccatgttgacatggatgccagtgcagccggcaaggggacttacccccattacatgttaaaagaagttgacgaacaacccgcagtaatgcgccgtttgttaaccgaatatgtggatgacgctggtcaaatgaaaatcgatccagcaattcttaaggcaattgatgacgcagaccggatttatattgtggcagctggtacaagttaccacgccggtttaattggccaatcattatttgaaaaattagcggaaaaaccagtggaagtccatgtggcgagtgaatttggctatcacatgccaattctatcgaagaaaccattcttcattttcttaacacaaagtggtgaaacagctgatagtcgtcaagtattggtgcaaacgaatagattaggttatccaagtttaacaatcactaatagccaagggtcaaccctttcacgagaagccaattatacattgttgcttcatgcgggtcctgaaattgcggtcgcttcaacgaaggcttatacagctcaaatcgcagttgaattattcttggcagtagcacttggtcgccataccgctatcaaggccgcccaagatttcgatgttaatcatgagttggctttagtcgcaactgggatggaaaccttattgagtgaaaaacaagcgattgaagatttcacaacgatgtacttgaagacaacccgcaatgccttttacatcggccgtggcgaagattatgccttgagtttagaagctgccttgaagttgaaggaaatatcatatattcaagcagaaggctttgctgccggtgaattgaaacatgggacgattgccttgattgaagatggcacaccagtgatggccttcttaacggatgctacgacgattgatcatacacgtggtaacttacaagaagtccgcgcacgtggcgctaagacgttaacgattgtcagcgaagatcacgcacaagctggcgaccaagtcgtgttaccaaatgttaatccattactagcaccattattaggtatcatcccaggacaactgattgcttattatgcaagtcttcaaagaggctacgacgttgaccaaccaagaaacctagcaaaaagtgttacagtagaataagagtggttttaaaactggttagcttctgaggattagctcagggagacaaataagcgatggaaccgattatttgtctaacgtggctaaacggaagaagctagttttaaaagcacgtttcaaaaataagagtggttttgataccgggtaacttttgagcatttgcctaacttggcgaactggcgaaggattcgccggtttgacaagtgtagcaaagcacagaaagttggtattcaaagcacgtttcaaaagtaagagtggttttaaagcttgatcagattttgagcattaacatagagtggtgaattagcgatgaaatcgctgatttgacaatcgtcgttaagcgcagaaatctagctttaaaggcacgtttcaaataagagtggttttaaagctcaattagattttgagcattaacttagagtgacgaatataaaaaggcattcagattaatttctgaatgccttttttagatttgcttaaatgtcataagtagcgcgtggcccaccgacgtattttggtcgtgatcgtagtgctgtcacgtgtgcagcgcctaatgtatcgagactaggacgcacgggaacttgcacgaatttcacgtgcatgccaatggccgtatcgccgatatcaaggccggcatgggcgacgatatgttccacctcaacgggatcgctatattgttcaaaagcagcaacggaacaagctccaccagcgtgcattgcgggaacaacggagacaatttcgaaattgtgtgcttcagcgactgaacgttccattactaaactgcgattgatgtgttcgcaaccttgaacagctaattggatatcgagtggcttgagaatttctaaaagggtttcgataatcgttgcaccgacttcgcggctagaggctttgccaatatggccgccaaccacttcactcgttgaacaaccaagcacgaagatatcgccacggcgtaaattggcggctgttaagacgtcgttggtaatttgggttaaatcctgtttaatttgattgagattaattgacatataaaaaaactcctattcactaaaaagttggggacgaacccggtaaagttgtttgaccaagagaactgtgactaaaataccaaagccattttggacgatattactaaaaatagaggcgattcctgcggcccaaccgaagagccagctcgtggctaaacaataaccaacgaccatgatgacgctcccgcatagcagtggcatgagtaagcgtctgggctgctcatcattgcgggtgaggtacgcgacaacaaaaccttgggtcccatgaattaaaagggagaacaagcaccattccggataacctgacaataaatcgattagtaaaccgctcaacgcaccaactgctagaccgcccggattctttaaaataattgccgtggtgtaaatacccacttcacagagcgtgacaaaacctttagtcgctgggacgggaatgatgaataacatagataaggaaacggtgagggccgttagaatcgcaataacgggtatttgacgctgcttaaaattcatatgagcctccttgacgcacattaccgaagccatggcgcagttgaatcccattttgaatcccgtgatagacgaattgtttagccgctttaactgcgggataaacggcatgaccgcttgcaatttcagccgtaatggcggctgatagggtacaaccagcaccgttgcgggttgcgctagttaagcgtggtgcgctgaggtagtggttagttgtgccactacgcaacaaatcgatggcgtcatcaccagggaatcgttgcccacccttgataacgacatgttgtggcccgagagattggataatggttgcggcttgttctagttctgcccgcgtttgaatctgcggtaagccgcttagtaattgcgcttcaactagattaggggtcacgactagggattgcggcaataaaacgcctttcagactatcaagatagtgttgttgcggcttatcagtggtttctttgaaggccaagaccggatccgtgatgatttgcaaatgcggttgtttttgtaaaagatgaccaattttttcaagtgtcgtggcatcgttgattaagccaattttgatagtcgttagtggcacgtaatgcaaaatggcttcaatctgggctaataccgtttcggtttcgatattctgaatttgaaaagtttgatccggcatgaccgttgcgaggcaggtcacagcactgacaccgaagtgaccaaaggcttcgaaggttttcaaatccgcctgtaagccaccgccacccaatgtatcagaaccagcaatagttagaatgtttgacataagccgcctccttttggttatattaaccttaacggatagtgtgcggtgacaaaagagccaattggcttgtttttttaccagccaatttatacacttaaagagaggtgaggacttgatagattgggcacgttatttaccaacacagaaaccaaaatatttagcgattaaaaaaatggtgattaatctgttagagcaggggttattatcgccaggcgaacaattaccggcagaacggtggttagcaacacaattaacagtgaatcgctcgactgtgacgcgagcgtttgatgagctgacgacagatggtatgttggtgcggcgtgttggcagtgggactttcgtcagtcaacaggctggtgaacaacaagcacagcggcgcgttaattggcatacgtatttaacgtcgcaaccttttcaagttgggcaagtaaagcgcaaggcactgcaacaattaattgcacagcaacccaccgatttaatcgatgtttattcgagtgacttaccggctgatttgatgccacaattccaatttccaccgttaacgtggcaagattttaaccaagctcaagaagcagaaacacgacttgggtatgccccattgttaacggcgattaaccgcttgaatcaggagaatcaaaaattagtgttacctgaaggccaactcctattgaccgcgggtgcgcaacaatcgctctttctagtattacaaggcttattggtaccgggggatgcagtagcggttgaatcgccatcgtttttccatgaagcgacgttatttgaagcaactggcattcgctcgtttggtgcgccacttgatgcagaaggcattcaattggctgcgttggagcaattgattgtaaagcatcgcattaaattagtcattctcaatccaaattatcaaaatccgacgggccaagtcatgagcttagaacgacgacaggcggttattcggctttgccagacttatcaagtgccgattgttgaagatgatgtttttggttggttacgctttgaaacgacaccagccttgccaacattaaaacaacttgatcctgaaaatgtgatttatatgagctctttatcgaaaattatgggtgccagtactcgaattgggtgggtcgccgcaacgccgcaagtgattgaccaattggtgcgtgttcagcgggaaatggatttggttccgagtattatgtcgcaagtgatggccgccttggcaattcaggagccgcattttcaaacgcaattagtcacgttgcgtcaacaactacagacaagggcacggcagacgcaacagcttttggcgcgagcgttgcctgactggcagttcagtgtagcgcaagggggtttttatatttgggggacacgagcagttaaaccgtatgcactagcaccatttgttgcggcgcatgtggcactagcaccgggcacattatttggtgcacaccaggctgcttttcgaattaattttgcgcggctcaatgtttctcaactaatggcattggcgcagcgtttacaacgacttttaaatgaggagggctgattaatgacagaaaaatttataccagaaatttatacgccacttaaaacgagcgttgttggaccaccagcaattgcgcgccaagtcggcgggattaagattttaggtcaaaaaattaaaacgttgatcttcacgactgacgtggcgatcgtcaataataccaacgcggatgccgtattggctgtttatccgtttacgccgcatcccgcggtaatgaatgccatcagtaacgtggcgaccattccagttttaaacgggattggtggtgggctgacagcgggtagtcgctcagcgtacatgggcttattggcggaagcggctggttcaatgggtgtggtggtcaatgcgccaacttctgttgagaccattaaaatgattaataaggtagtggacgtgccaatcgtcggtacggttgtctccgaacgtcagaactatgcggcccagattgaagccggggtttcaattctcaatgtaagtggtgcggcgaagacaccagcgattattaaagcgattcggcaaaaatatccgcaaatcccaatcatcgcgacgggtgggcatgatgaagagactattctaagtacgattgaggctggcgccaatgcgttgacctacacgccgccgactaacggggagttattcgctaagaaaatggcggactatcgtgcggatttagattagttgaaagttgacgatttgcgaattcccccgtatgcttaagagatattgaaggaggtttttgaatgattcgtcaagcaacaattgaagatgcacaaagtgtcttacccattattaatatcgtttttgaagaaatggagatgccactttttcaggagataccgctcgaaaatctatttaagatcttaaaacaggcatttgaaatgccagaataccggtatagctatgctaatacgctggtttatgaagaagacggtgaaatattagggattgtcgttggtttcccagaagaaaaggaagcccacatcgatgatgtattagcaccacttttcccacaaatcggtttacctgaagaaacgcgctttttcacggataaagaagcccaaccaggtgaatggtatttagacacactagctgtggctgaacacgcacaaggacgtggtgttgggaccgctcttttgaaggctttgcctgattacttgaaacaacgtggcgagaagatgatcagcctcagcgtcgatttacaaaatcccggtgctaagaaattatacgagcgcatgggttttgttaaaaaaggtgagctaatgattggtgatcaccgttatgaacatatggtcaaagctatttaatttaaaattttagaaaaaggctcggacaaatttacgtttgtccgagccttttactttaataatagcgatgatatactaatacgaaagtggtttaacacgttaactatagaacggtagaattggaggatcatttagaaatgaagcaaaaaacgatgcgctgggcaaggggctgttcaattggttgcctaactatcatgttgttatttggtgtacttattttaacgatgtgtcatgtgccaaaagcagaatacggatcatatattacggcaggtaatcgttactatcgaacagtgctggggatagcacccaagataacacacgattggatgtttgctgatgaagacggctggtttgatataaccgttaaattgacgaaagcgcaacgtaaaaaggctttaacaagactatatatgaaatcaatgtcaggagatagtgaatattcatttaggggcacttcgacaactcctaatattgttggcttatcaaaacaggaaacaatgcttttggagcagtccaacgaatattcagaattcaatcaaccagtttctgaaatgctgagtggtttattagaaggaagtgccgatagaacagaaataaatgatttgaccaatggcggggagattcgcttttactcaactgaactcgctttttggcgtcgttttttagagcattatacgtggctaaagactagaccattcaaagaaagaatccagtggctaagtcgacagacgaatagtagaacctatttttatattaaaaaatatattccagtaaaagaaatgtcaacggggatgctcgctaatttgattgaatccgacgatgagggactatctgaaccaatgatgaagcaatatttacccatagaaataattcggaattttccagtgggtagtctttatgaaattgaatttgagaatcagcagtctcgcaatttatatgagtcaaatgaagcacacgaattgattaaaagtcggtatgagtatccggtatcgtattgattactaacctaaaaaaacgttattagcacgaatgctaataacgttttttagtttggtgactgaatcttaattttacgataatagcggcatgatcaccgtggtccatagccagctaagtggcatgacgaggatcattgccgggatcatatccgcaatgggaaactctttaattttaaccattcggaaaccagttgcgagcattaaaaagccaccacaggctttgaaatcggcaatcatggtaggtgtggttaatgggaaaattaatttagcgagtaagaaaataatatagaagatgataaattgcggaatggcaatggctgaaacgacataccctaagttgcaagcaaaaatcgctgcggtgaagaaatcgagcactgatttggaaataaggatggtgctattaccagtcataccggcatcgagcgtaccatagataccggtgccgcctgcacaaaataaaacgatgacggttacgagggctgaaataaattcagcatctgtcaaagttgttttacgaactggaaatagttttgaaatgggcttttccattaagatggcgccacgatcaatccagtgaccgaaatgaacggctagtccaatgccagttcctaagacaattgcgaggataacggccggcatatttcgcatgacaacaattgcgttgatgcccattcccattgaacaaacgccgaagattaaagtgatctctgttttgaatctagcggatagtttatcacccaataaaccaccgataataccgccgaataagacggataatgaattaataatgacgccagttggcattgtaaagacccctttaattttaaaaataacatattcaactataccaattaaaaaaaggggacgcaaatttttatgaatttaacgttgggcaacaaaaaagtcaccgcttttgacggtgactcatttgtttaactaaaacgaagtgtattaggtgctaacttacggataaaagccttcggttgtgtataaacccaatgatttaaaacggccgcaatcaggatacacgagacctgatcagcctcattagcaatcgttaatttaaaagtagggccggcacttgtcaggataagattggtttgcatgatggtttgggtatggtagataatgcggtattgattctgaattaggtcgcccatgattagccagttgagatttttaacatagacgaattcatgccaaacaccccaaatcttctggaggctgccgattgattggccgttttgaaatagttcaaaactgggtgaaaacccgagtgatttctgtttgatttcaccgagtaattcacccgaaagccggtagagtgaaaagccatcttggcgtaagccacgactgccgactaagaggaataagggccgctggtggtcgttcataatggttgaaacgccttttaaggcacttgcttgatgcttaatatataaatcaggcataacccatcacttcttttcggctgcttggttaagatcaatggcgtgataaatggcttgagcaacgccgtcttgtgtgtttttagcggtatggtaattagctaagtcggtaattgtgggcactgcgttagccatcgcaacgccaatgcctgctgcttcgatcatggaataatcattgagattatcaccaatcgccattgtttcagacattggaattcctttttccttggcataggctgcgagcgcaatccctttttgcgcgttgatgtggttgatttcgatattgttgctagaagaggaggtgacaattaaatcgccacgttcttcacagaaaaccttcacgggttctagatccgcaagacctttcgtactgaaagcaataattttaacaattttgatggttggatcagcaataatgccggcataatgatcatcgacatagttgatattcattaattctaggcgcgctgcagctaaggcaacggcaattttataactagtatcaggattgaggtcgactaatagatcggccacgttttgaatgcgattgacctggctgtcagaatagttcccggcagtggtcatcaattcaaaatagtaaccactagcgcgtaattcatccgtaactgccacgacagtagcgggttcaattggaatgttgatgacttcgttgcccaattgatcgaagacttgggcgccattcatggtaattagggctggtttgataccaccttcagccattagcggaagtgcttcgttgcgactgcgcccggtagcgacgatgaattcaataccagcgtcttgagccgctttgatggcattgatgttaccgtcagaaacctgcattttatcatttaaaagggtaccgtccatgtcagatgcgataagtgaaatcaattcaattcctcctgaaaacgtatttttaaagacttagttatatcttagcatgggagggcactttcttctagcaacttgtgttaaaacaggataaactaatcgatgaggtgaaaaaatgaaaacaattattcataatgattggcaaaccgtcttagaaccagagtttgccaaaccttattatggtcagttgcatcaatttttgaagcaagaatatgcgacgactacggtctatccggaaatgcaccatatttttcaagctttcgagtggacgccatttgaacaagttaaagttgtgatactgggtcaagatccttatcacggtccacatcaagcacatggctgtagtttctcagtattgccaggggttaaagtgccaccatcattaaagaatatctataaggaactacaaacggatgtcggttttaatcccgttaatcatggctatttgaaggcctgggcagatcaaggggtgttcctattgaatactgtcttgactgtgcgagccggtgaggctaattcccatcgccagcaaggttgggaacaactaactgatgcggcgattgcagccttgtcacagcgcgggcacgtggtcttcattttatggggcaatgcggctaaagccaaacgggccttaatcgatgaaagtcaaaatgcggtgttaacggctgttcatccaagtccgctagcagcctatcatggcttctttggttccaaatcgttttcacaaacaaatcagcagttaaaacagtgggcaatgacgcccattaattggcaattaccacaagacgtttctgaacaaaagtaaaacgctatcattattgacttgtcggacgataagaaacgttgtatgattgtatcagattataaataaaacgcttttatggaggttactattttggatttatttgaaagtttgaaagcaaaaattacgagtcatgattttaagattgtttttcctgaaggaacagaacctagaattattggtgcagcagcccgtttaaatgctgatcgaattttaaaaccaattttaatcggggatgcagctgatattcaaagcattgcatctgccaaagggtttaacctcacagggattacaattattgatcctcaagcgtatcctcaagcagattttgatacaatggtagcagcttttgttgaacgtcgtaaaggtaaagcaacggcggaacaagcccaaactattttacaagatcctaattactttggcacaatgatggtttatcttgatttggccgacgggatggtctcaggtgctgttcactcaaccggtgatacagtccgtccagctcttcaaattattaaaacaaaacccggcatccaacggacaagtggggccttcatcatgcaacgcggtcgcgacaatgaacgttatttattctcagactgtgcgatcaacatcaatccaaatgcacaagaattagcagaaattgcagtggcttcagcacgcactgctgaattatttgatattgatcctaaagtggcacttttgagcttctcaacaatgggttctgcctgtggtgaagaagtgacaaaagtccaagaagcaaccaagattgcccaagaattagcacctgacttagacatcgacggtgaattacaattcgatgccgcttatgtcccagtagttgctaaccaaaaagcaccagattcaaaagtcgctgggcaagccaacgtcttcgtattcccagaattgcaatcagggaacattggctacaagattgcccaacgtttcggtaacttcgaagcaatcggtccaatcctacaaggcttgaacaaaccaatctcagatttatcacgcgggagcaatgaagaagatgtctataagttagccatcatcacagctgcccaagcattacaaaactagagtatattagcatttaatcaaagaggcttaggataatggggacgttatcttaagcctctttatgtttgcttttttagaatcttcggatagcaatgctttcctcacttgttatttttcggtataatgcagacaaagagtcaatagaatgaggcgaattatgttagaattgcaaacaacgcaaccagaagaaacgattacgattgctaaaaaattaggccgccaattgcaagcaggcgatgttttactactcgatggtgatttgggtgccggtaaaacaactttcactaagggattagcggaaggtttggatattaaacggtatatcaaaagtcccacgtttactttgattcgagaatacccagatggccggattccactttatcatatggatgtttatcggttagaagaaaccggcgccagtgatcttggtttagaggaatattttgatggggatggcgtttcagtcattgaatggagtcaatttattgctgatgaattaccaagtgactacttgacgattcatttcaataaaaatgatgacgacgatcaaatgcggacacttgtttttgaaccgcacggtgcgcgttacacagccttggttgaggctatttttgacaactaaatctttagtaattcggcctgtgcaggtaacggatgcacgggcttatttatgttttttaaaccaagtggtacaggaaacgccatttttaccgattgcagcagaaaacttggcgatgtctgaggcgttttgcgaactgacgttacgagccgtgcttgatagttcaactgatgctttatgggtgacagttgatggggctaagattgtcggggctgctcggcttgtgagtgaacccgaaccaggcttgcaacacattggcgaaataagtgttgccgttttaaaagcatactggcgacaaaaaattggcacacaattgttagacgcactattacaagcaatcagcgctagtggacaaccgcgccgaatcgtattaacagttcaagcacgtaaccaaggtgcgattcagctttaccagcaatttggttttcaaattgaggccaaactagaagcgggctattatgatccggcagttggcatgctgccagtattgcaaatggtgcgcttgattaatatagagtaggagatttaaacgtgatacaacaacggagaaaagggatttatttagcaattttaggctcaattttttggggtattcaggggccagtatcacaatggctatttacagatacaccaattgcaccagagtggttgatgggcgtcaaaatggggttatcagggctcttcttattaggttatgcattcagtaagcaaccgaaaactgtcacagcagtttggcggcaaccgcgagatgctgggcgactattggcttttgctattttaggattatcggctgtccagtacgcttattttttaacaattcaagctagcaacgcaccgactacgacgattttacaacaattagggaccgtcatgattatcattatcagtcttgtgatctatcataagacacctagccgaaccgaattaatcgctgttattgtcgctttattggggacttggttattggtcactaaggggcaactcactcagttatcgatttcaggcgcagcgttaggcttgggcttgtgtcttggtttctcaggtgcattaaatacgttaatcccaggtgaattatttcagaagtatgatacgttggtgattgtggcctgggcaatgctaattggaggcgtgttatttaatgtgattcatccattttgggtggatgcactaccaatgaacatgcccacaatcatcagtgtgttatttattgccatttttgggacagctttggctaacctttgctttttagggagtttgaattacattacccccacaacagccggtttattgaatacttttgaaccgttagctgcgacaattgggacagtgttatttttaaaaacgagtttcaatcattgggaagtcatcgggggcttgttggttatcagtacagttttcattcttagttttggaaatcgccggggaatcagcaaaaaataagttaacgtaataaagtaaatgtggtacaattattagtggataaaaagctatttaatcattagtgcgatcgctaatggttaaatgtattaatgacacaccttaatgttgatttagctttaatccaccattgctaataaagaggctatcagtaaccatttcagttactgatagcctcttttgttggtaggattaaatcgctttgaagggcactctagccgattattttcgtgacctgttttagtgggtctgtaccaaactcttgtgcttctttaatcaggattttggcacatgcgatactgtcagctagtgcattgtggtgattttcgagtggaatttctaagttggcacataacgtatttaacttatggttttcaaattggggataaagccggcgactagttgttaaggtgtcgagggccaaatagtggggttctgggatgtcgtagtgttggagtgtgctacgaaggacaccgatatcaaaggtcgcattgtgcgccacaactaatttttgcggtgtgaaaaaaggtgcgatgtgtggccaaacttgatcaaactcaggggcttgggccacatcttcttcataaataccgtgaatctggctattacggctactaaaataagtttcgggtttaataagggtgtaaaattgatcgacaatttggtcgtcacgaacaacgactagtgcaattgaacaagcactgtcgcgttgaccattggcggtttcaaaatccattgcaacgaaattcactgtttctacctcgctttatttgaagtttgcttattctaagcgaataaatcttgtgtgtcaagttctacaggacaatgatctgaaccatagatttccgtatggattttggcatccattaattttggttggagctcgtcagaagtgatgaaatagtcaatccgccaaccggcgttgttatcacgcgcatggaatcgataactccaccatgaataaatatcggtttggtcgggatagaaataacggaaagtatcagtgaatcctgattgaagaagggttgtcatttgggcccgttcttcatcagaaaaaccagcactcttgtggttggtacgatcgtttttcaaatcaattgcttcatgggccacgtttaaatcaccacagaaaataaccggcttttgcgtacctagttgttgcacgtaagttctaaacgcgttttcccaagtcatgcggtaatctaaccgttttaattgattttgcgaattaggggtgtagcaagtgatcaagaaaaattgagggtattctaatgtaattacacggccctcatggtcatgttcaggttgttgaataccgtaagtggcgttgagtggttcatgtttcgtgaaaatagccgtaccagaataaccttttttctcggcataattaaagtattgatggtagccaggtagatcaagttcaacttggccagcttgcatttttgtttcttgtagacagaaaaaatcggcatctaattgttcaaaggtagtcataaaatccttttttaaaacggctcgtaagccattaacattccaagagataaatttcatagcgcttcgcctcgtttctatcctatattttaacggtctatgagtaattacgcaaaagaagtgttgactgttcaattacggtctactttgttaaactagaataagattatttgagaggaacgacagccgtgttaagtcaaatcaacgcatttttagaagcaaatcaaacaattaatgttaaaaccaatgaacctttaagtaaatataccttcaccaaaaccggtggtccggctgatttattagccttaccaacgtcagttcctgaagtgcgccaactattagtagccgctaagcagaatcaattaccaattactgtgatcgggaatgctagtaatttaatcgtccgtgatgatgggattagtggcttagtgattatcttgactgccatggatcaaatcgatgtgcagggcacaactgtggttgcacaagccggagctgggattatccaaacctctgaggctgcctatagtggtagtttgacgggattagaatttgcggctgggattcctggaagcgttgggggcgcggtattcatgaatgctggggcatacggtggtgagattagtgatgtcttaacatctgccgaaattttaacgcaggataatgaagttgaaacgttaacgaacgccgaattaaatttcagctaccggcatagtttaatccaagaaaatgggagtattgtattgtcagcccgttttgaaatggctaaaggtgttgcaccaaccatccgcgagaaaatggatgagttaaacgcattacgcgctgctaaacaaccgttggaatatccttcatgtgggagtgtcttcaaacgaccagtgggccattttgtggggcctttaattcaaaaagcaggccttcaaggacatcaaattggcggcgcacaagtttcagaaaaacacgctggttttattgttaatcgtggcggcgcaactgccactgattatttaacgttaattgcgtatattcaagaaacaatttggcacaaattcgaagttcgccttgaaccagaagtgcgaattatcggtaaagaatcagaatagtgaaaatgggggccagtcattgtacgacccctatttttgcatgaaagtgagggatttagatggctatcattgaagctgttattttgttagtgatgctgttgattgtcgctaatatcatcggtcactatgtaccacgactaccagtcagcctgattgaaattgggttgggcttgctggtggcactacttttttcagttgagattccattaagaacagattggtttatgttagtgtttgttgcgccgttgttgtttaacgacggccgccggtttcctaagcgggaattatgggcactgcgaggaccgattattggaaacgcgattttcttagtatttgtcactacattgattgggggcttagcgattcatttgctagtgcctaagttgccattggctgcgagctttgcgttagccgctattttatcaccaacggatccgatggcggtccagtcgatttcagaacaagctgacttgccgccacgcgttttacatttggttagtggcgaaagtttaattaacgatgccagtggcttgattagttttaaatacgggattgccgctgcggtaactggctacttctcgattcaacaagctgccggtgatttcttatacatcagtatcgttggcgcaattgctgggatgttgttgatgtatgcaattcattttattcgactgtttatgttgcaacaggggattgaagatgttgttttccacaccgtcttgcagttgattaccccctttgtgatttatctagtggttgaagatttactccatgcctcaggtgtgattgccgtggttgtggctgggattattagtcacgcaagtcgcaatatttacttggattatttaccagaactaaaattagtgacggaacaaacttggtcgattggtgtttatttattgaacggccttgtctttttaatcttagggattgaattaccagttgcgatgagggggacggtgcatagtccactgattaatacgggagaagaaattctcttggtattagcggtttggggaattctaattttaattcgaacctgttggacattaagttacttgttgtacaccaacaaatcgaatccgaagcaattaaaagataaccttaaaatttcagtcctttcagggctttcaggtgtgcgaggagccattacgatggccggggtgctttctgtaccgactgtgcttgctgatgggtcaccatttccagaacgcggtttaatgctatttattgcagccggcgtcattatcgttagcttggtgatggcgattatctttatcccaatattaactaaggtgagaacgccgattgaattacgggggactgcccacgaagatacaaatgatgagacaggactcgtaccagttgatgatcaactgctgagtgaatttgatgccaaaatctatatgtatcgtgtggcagttgggacggttgaatcgctgcgtcatattgaaaataatcgagcggcactagatttaattgctgaatatcaactgatgatgcgccgttttgaaaatcaacaaaacgagcagacagaaggcgatgaattaccaccgttgattgcagaagaattaattttgcggcaggttgcctttgaaggtgaacggcaaaaattagaaactctgcggtctgatggtgaaattacggccaaaacttaccgtcgtggtaaacggaaattacggcaaaagcaaattgctttgtcggtgattggcagtaatttcagttggcgtcatgtccaattgatgttttatagaggtttgacgatgttgaagcgattgatagcgagattaaaaacatcgcagaaatcgacagcggcgctcactgaatggcgaacgaccgaaaaggaaatggctaaagcgggcatcaaacaactgtcgtatttcttgaagcaacctgagaaccggcagcatcattataaccggcaagtcatttatcaaattattattcgttaccggaatcaaattgaaaatatgaaaaatatcggccatacgaagacggatatttacgaacaacaactacaaaaattacgaatcaaggcgctaacgagtgaacgacttgcgattcaagaattattggaacagcataagatttcatgggaattggcggatgagttacgcaaagatattaactatgctgaaaacgcgttgatcttggcggacacggatacggaataaaaagagagtgtgccatcagtcgggtatatcctgaggattaacagagagtggcgaatgattgcgtcagcaatcgtttgacattcggcgttaaccggaaggatatgactgatagaacacgtttaggctagtaaaaaagactcagggcaatgttgtcctgagtcttttttaaaacaatcgtcttcttctaaaataacgcgttataatcgcaattaagattgccattagtcctgatactactgagattagaagccctagtttgaaataaggtggccggtaagtcagtttaatttggtgatgacccgcttttaatggaaccgcgatgaagttcttgagccctttgaccgccttcacggggtggttatcgaccgttacttgccagccaggggcataaggaatcgtcgtcattaagacctgattcttgtgcttgatcgtgatatcaccgctgatatgggtatttgaaaagtgtttgatgtgtaacggtgattgttttaattgcgttgtaatcttgcttaatgtttccaagttaagactgtagagattgatgttttgaagccaaatttcatcctttgaaaaggcaatgtctaacgtctgcggtttcccgagtgccttgttagtcaagttaagtgcaaccgtatctctaaaggtatcgtattgcgtaatcggttgaccgtttaacgtcaagcgcacagcattcttctcgagacttgagcccagtgttaaatagtaagggtcattcgtcgtcggcgtgaaggtgtaggtcacgtgcgcatcttttttagaattaatgcggaggaaggtttcgtttaacttcggtttttgtttagtattttgataagaaacggtgttgaaatattgaagggtaaataattgactgccaagtgttggattatccgttagcttggttgcaatgttcccctgttcaagaatcggatagtccgccgtgactttatgcttaagtactttatcagaagccgcaaaaccgagtggtaacgcattatcattttgataaatagcaatctgaccgttttgcttgatttggcgatagtcacttaaatcgggtttgttggtactgcgcggcacggttgcttggacgctggtgctgtttaaataataccgataacttaataatgcatcagtgaacatcgtttggttggtatcggcaacggaaccatcaccagctggttcgccaatgctgcccataaatttaggatagcttggttccaacattgaattaaagtgggaaccgccgaaataattggcttgcatcggatcatttttagttcgcatgaacgttttaccaatgcgttggaatggcaccttattagggacggcggcaactgctgattgcagttgttcggtgtaatcagcgtaatccttttgtgaaacgtagctaatttgattcaagctgagaactgcattggcggtcatttcgccgccggtaaccagtaataaaaagacggtagtatagcgtttgaagcgtgctggcaacattaaaattaagctgaccgcgattaaaaaaccaacgctaaggagtacttgtcgttcagataacgccgaaaatgttttgacgtgtttgaaagtataagcaagtgatgccgctagtagtaaaagtggtgctagcaaactgtaccacttaaactgtggctgataatgcaatcgctgaacagctaagacaattagccagaaactaatcacgtaagagaagcgataagggtaccaaactgggaattgcatgccgtgccagagtaaatcgagtggttcaaagcacagtgataatccgagaaaaccagtcactagtaatgcggccagtcgttctttaatcggaatgctgcgggttaggaaataggcgataaaaccaattaaaacaagactgccaacgaaaatgttaggttcgccttttggcatctgatcgaaattgaaattcccaaccaccaatttagagagaatcttgaggggattatagtcaattttccagtgaatcttttgaatcgtatattggcccttactttgtgttaattggaagaaagtcggtaataacagccaagccgctaacaagccagctagaattgaaccaccggcaaatttgagataggcgaggtaagtttggcgccaagttttaaaatgatggacactcgcccagaaaaaataagcaatcacaaataagcaaaccatgtagcccatataatagttaataatcaataaggccgctaagctaagtgggtataaccaaaaacgctggcgctcaaagagttgttcgatgcctaaaatgactagtggcaaccaaatcatggcgtctaaccacatcacgttaaattggttggcaatagcaaagcctgatagtgcataggctagactgagtgttggcagccaccaaccacttagtagacgacttttcttgagataataggcaaaactcagcccactaaaaccgtatttgagcaataccattagccaaatgccaaagctcaaccatttaccaggcgtcaataagacgagcaggttaaatgggctcattaaatagtaggcccaaacaccgagcatatcaccgccaagtcccttggcaaatgaataaaagaaggtatcggggtgctgaagtaaggtcgttctaaaataagcaaaaaaatcgatgtattgttgccctaaatcaaccgtcataattgtttgtccgccaaacggaaagacgtggcgacttaagccataaataaaaataatggcaaaagggagtaagaagctaaggcctaacgcgtagtggcgtcgtaaaaaagtgtataatcgagtcacgagaaacctccaattaataaaaaaatctaaaaattagtttgatgaacagcttttaatgatgaaaagctgtaaaatataacagtaatgttaatcctctttaggataccataatctcacttgaatttagagattgggcatagcttgttatggataattttgctaaacttaaccaatgaagcatatgctatgtacaacaatcttattttattaagatttaaataaagaatcgcaaggctttttcaaaaagcctaataataaggagtaactgattgtccgtgaaaattatgaagaaaaaaaccaagagaaaccgggagagatcccacattccattcagacttaacttcctattttttatcgtttttgcattatttgcagccttgattattcaattgggacgcttgcaagttttaaatggtgcgagttatcaggcgatggtcaatagtaccgataaaaaaatcgtgacgggcaatgtccctcgtgggatggttttagatgccaaggggcgtgtgttggtcggcaatagtgctaaatcagcaattacgtatacgaagaatatgaacgtcttggcggataaaatgtatgcggaggccaatcagttaacgaaatatctaaccatcgataagttggatacgttgacggaacgtgatcagattgattattacctcagcaatccgaagaatcttaaaaaatggaatgctcgcctaccaaaatctagaaaagtagcggctgatggttctaaaattccggataagacggtttatcaatcaacaattgatcttgttgaaaagtcatttactggcttatcagataagcaaaaacaagccgcagcgatttttaaaatcatgagtggtgcttatcaactctcaacagtttacatcaagaatgacaatgtaacggataaagaaattgctgaaattagtgaacatttaaccagtttacctgggatcaatgtcgggaccgattgggaacgctcatatcctaacggtgattcaatgcgcagtattatcgggcatgtttcaacagaagaacaaggattaccagaagacgggattaattcgttactagctcaaggttattcacgaaatgaccgggttgggaccagttatttagaaaagcaatacgaaagtattttgcacggctctaaatcacaaacccaagtggaagttggtaataacaatcaaattctctcaagcaaagtagttttcaagggccaaaaagggagtaatttaaacttaaccatcgatcaagcctaccaaacaaaagtggaagcagccttgaagaaaatttacgccaaagcagtcgctgctggcgcaacgacgtactctgacggtgcttatgcggttgcgatgaatccaaagaccggcgcaattttagcgatggctggtgaacaaaacgaccgtactactaagcaagccagcgatgatgcgctaggggttatcaatcgcaccttcgtcatggggtctgctgtcaaaggggccacagtgatgggtgggatgatggacggtgttatttcaccaactaataataccttgccggatacgccaatttatttaccaagtaccccagttaagaaatctgtttacccagtggggactttcgggtcattatcagcacaatcagctttggaagtttcttccaatatttatatgatgcaattggcattacgtgaagggaaagctgagtacattcccaataaaaaaatcaatatttcaccggatatctttccgaaaatgcgcggttacttcaatcaatttggtttaggccaaaaaaccggtatcgatttaccaggtgaagcaaaagggattgaaggaccaactttaacggatgatgggagtacagccgtgggttccgcactggatttatcctacgggaactacgatgcctataccttgattcaattggcacaatatatttcagcaattgccaacggtggtaaccggatgaaaccttatttggtggattccattcaacaaacagggacggatggaaatctaggtaaactcgaatctaagactagtccaacggtcttgaacacgattaacgcaccaaaatcgtactttaatgttgttaaagaagggatgtacaacgttgtcaacgggactaatgcttgggggacagcgcacaccttgaaagatatcaaaccaacctttggcgctaaaacagggacggcgcaatcatttgcacgtgaagatcctaatgattcaaacagcaagcaagtggaaaccgtcacatcaagtcttgttgggttcgccccatataatgatccacaagtcgccatcgcgattgttttccctaacttgacatccgatgaagggcactacaataccttgttggcgcgtgaaatgattaccgattactacaaattaaataatatttcaaaatgaaatattgcgaattaaccttttcagatactagaaaaaatggtatgatactaagagtctaagaattaaacagttttttagaaatttacttacagcttggaggctatatcaatgcgtgttcacattacaatggaatgtacagaatgtcacgaacgtagttacttatcaaacaaaaataaacgtaacaatccagatcgcttggaattaaagaaatattgcccacgcgaacgcaaagtaactttacaccgcgaaactaaatagtgacgcataaaaaaagccggggcgcttgcccgggctttttttgttaggaggggtcttcgtgcaaactaagcaacaagtccgacaacagggtttggcagcgttacagcgtttagcccaacaacccgctaacaagcaacaacaagaagcaatcttgttacaaaaattaattgacagtgcggcttttcaatccgcaaccgtgattggaatgacgcttaatcaaccgattgaagtcgcaacgcaaccgattattgaggctgcacaagcggctggtaaacggattgtagtgcccagaaccttgcctaagcgtcagatggccttttatgagttgacaccaacaacggtccttgagagaagtcattttggcgtcttagagccgcagataactggtgagccaattgtgccggacttaatgattgtgccaggggttgtctttagtctagacggttggcgtgttggttttggtggtgggtattatgatcgctatctggcagcgcatcagatgaacaatgttgcactcgctttaaagccacaacaagtgaaggtgcctgattggtcagttgatcaatttgatgttaaactaaagcacattattacggcttaagaaggagaagagatgaaagtaaatcatactaccaaagattggcgagaaataccatttgtcgcttatgctttgattatcatgaacgtcctttattttgggttaatgtttgttgcaccaatgatttgggcgcagggaattacgtcggtgcaaggcttgctggcaggtggggttgtcccatttttaatggcttcaattaaccatattagttttttaagtctcttaatggattgtgttattttatattttgtcgggagccaattagaatcattaattggtcattggcgcttattagcaatctatatactcagtagtttagcaagtttaatcacacaaggccttttcttaggaacaggttcgcaaacgattacagcgggcttagccgttcttgggatttttggtggttttttaatgcttggtgatgcgttcaaagataatccagtttttggtcagattgcgcgccagtattggttattcctatttttaacagccggattacaatttgtcgttaatcgcaatgcgatgtacgggatggttggcggtattttaggtggctttttaagtagtatggcacttggcgcaccacgtatcgggaaaattaacccgctaaaccgtgtggttagtgggttaatttacgtcattaccctcattttatttgtctacttgggtatgaatcgttaataaatttaggtataatatgataggtgaagttgatgagaacactttatgatgtacaacaacttttaaaacaatttggtgtttatgtccatgttggtaagcgactttgggatattgagctaacgagtatcgagttacgtcatgtctacgatgctggtttaatcgatggtaaagtgtatcgcgacgctaagatggtgctagtacatgaacatcggttggaagaaaaacaaacattcaatcatgaattattggaggaaaagtttaaatgacagacaagaagttaatcggcgttgacttaggtggtacaacggctaaatttgcaattatgacagtggatggcgacattcaacaacgttggagtatcgatacagatattttagatgaaggtagccacattgtgcccgatatcgttcaatcgattaatcatcatttagatttatacaacatgacaccagaagatttcatcggaatcggtatgggaacacctggtagtgttaacagtgaagaaggtactgttattggtgccttcaacttaaactggaaagtaacgcaatacttacgtcgcgatattgaagctggcacacatatgaaactagcagttgataatgatgccaatgtagccgctttaggcgaacgttggaagggtgctggtgaaaaccaacctgacgttgctttcgtgacacttggtactggtgtcggtggcgggatcgttgctgatggtcatttactacacggtgttgctggttctgccggtgaattaggtcacgtgactgttgaaccacgcggttacgaatgtacttgtggtaaaaaaggttgtttagaaacttatgcttcagcaacaggtgttgtgcgtgttgcgcgtgacatggctgaagaatatgctggtaattcaaaattgaagacaatgttagatgatggcgaacaaatcagttcaaaacttgttttcgacttggctaaggaatcagatcctttggctgtcaaagtggttgaccgcgtgtcatactaccttggtttagctttagctaacgttggtaacatgttgaacccagcctacatcgttatcggtggtggtgtttcagctgctggtgaattcttacgtaaacaagttgaagcttactttgaagaatttacattcccaaatgttaaacaaacaacgaaggttcgtttagctaacttaggtaacgttgccggtgttatcggtgctgcttcattagctttacaatttgaccaacaataatctgttaaaaaggaagttttgtagatgtttgtaatcgggacaattaatccaatgtttgttgttaatattatcttgatcgctattttgttatggataattggcgtgtgggtttactataaaatccaacgtaagcgtctaggcggcgaactgactgaaaaggcatttgaagaaaacatgcgtaaagcccaaatcgttgatttgcgtgaacgcaaggatttcgatgctggccatatcttaggtgctcggagcattccttacccaatgttgaaacaaaacatgggtgaattacgaatggatttgccagtttacctctatgatacaggcattacattaagcgttcgtgcagcattaaaacttcgcaaagcaggttttacgaacgttaaatggcttcaaaaaggttttaacaactggacaggaaaaacaaaacgtaaaaagtagattaaaaaaagacccaaaagtcgccagtgaaaaacagcagacttttgggtttttatatgaaaaagagtgcttttcaaagcgatttgactctgagcatttgcctagtatcgtgaataaacgacgctagtcgattgtttgcggtacgtagcaaagcacaggaggcagctttgaaaagcacgtttcagcacaaaaaaagacgccatctacaaaagtagggcagcgtcttgtgatcatctttaatcgcttagccttggtgagctgaatggctcttacggttagcgcgacgacgattttcttcgattttattttcttcttcttctataggatctaacacggttttcttaaatgcaaagagtgaaccggcaatcgcaccaacagtagaaacagtcccgattacgaaacctttaaaaaatttatgtttcatcgtaaaacctcctcaatcattcattcaaactatatgttcattatcgcgtatttaggcgcgaatagctagtaaaatacgttaattagtgtggtgaaataatgaaaaaagaaaagataattgtcattgtagggcctacgggtgttggtaagacggcacttagcctacaagtggcacaacagttgaagggcgaaattatttctggagacgcgatgcaagtttaccgtcatcttgatatcggtacggccaaagtaacgccggcagaacaagccattgcgccgcatcatttaatcgatgtcgctgatattgatgaacgtttcacggcttttgactttcaacaacaaggccaacagttgattacaaaaattactgaccgtcaacatctaccgttgattgttggtgggacaggtctttatttgcaagctttgttgtatgatatgacgctgggaagtgcaacggatgctgaacaggatttcagtattcgcaataaatggcaagcatacttagaacagcattcagaaactgatttatggcaggcgctggctaagattgatccagatgctgcggcaaaaattccagcggccaatacgcgtcgcgttattcgggcgttagaagtttatgaaacaacgggtgttttattctcgcaacaaaagcctaaggagttgcgctatgatacctttattattggcttgaattgcgagcgtcctgtcttgtacgagcggattaaccagcgtgttgaccaaatggtggacgccggattaattgaagaagcaagatgggcttatgaacgccgtacaacaagtccgcaagcagttcgcggcattggttataaggaattcttcccgtactttgatggtgagtgttcactagaagcagcaatcgagcaagtgaagcaaaactcgcgccattatgcaaaacggcaattaacgtggtttagaaaccaaattcctgttaactggtataatctagtcgagcatcaagaagcagacttagcgcgcatccaagcagatatccaaacctggttacagaaatagtggaaacggagtgaataatatgaattggcaagattcgttagcaccagaattacgggccaaaattgaagctgttaacgctcaaattgcgccacggcttcaagccttagatgaacaaatcattaataatcaagcaaaggttctgcaagcctttcaagaagaaaatatttcagaatcacatttaaatggaacaacgggttatgggaacgatgaccaaggacgtgataagttagaagcggtctatagtcgcttttttaagaccgaagacgcccttgttcggccacaactggtttctggcacacatgcgattggaacagctttattgggcatgttacgccctggagatgatttgctctatctgaccggagaaccttacgatacgctccaagaagttgtcgggatggccggtaacggtattggttcgatgaaggaatatcaaattggctttgattacgtgccattattggcagatggctcggtcgattttgaaacagctaagacgaagatcacggctaaaacgaaagtcgttgcgattcaacgttcacgtggttatgccgatcgcgatagttttacggttgctaaaattgaagagatggtgcgttttatcaaggggattaatcccgaattgattgtcttcgttgataatgcttacggcgaattctcagaaacaatcgaaccaacggaagtcggcgcggatgtcatggccggttcattgattaaaaatgctggtggtgggattgcccaaacaggtggttacattgttgggccagaacgcttgattgaaatgattggttatcgcttaacggtgccaggtgttggtgccagtgaaggggccacacaaggtaacttacaattaatgttcgaaggctttttcttagcgccaagtgttacaggaaatgccatcaaaggggctgtttttgaagcagcgcttttggaacaaatgggcttgaacgtttcgccaaaatgggatgcccctagaaccgatttaattcaaacagttaactttggtaaccctgatgacatggttaagtttgcgggttgtgtacaagcacaatcaccaatcgattctttcgtcacgccaattccaagtgactttgccggatacgaagatcaaatcgtgatggctgccggcacctttattcaaggcgccagcatcgaattttcagctgacggaccattgcgggcaccttacacgctttatttacaaggtggtttaacttatgcgcacgttaaactcgccattagtcgggcagtgcaaacaacattctttgaaaaataaacaggtagcggtgaatcaaattgacgtttgattcaccgctttttttgtatgtaaagcgtggtatgataagggtgcaacgaatcgtagcggtctgatttaaccattgcttcagattgttgctggtgaaaaaaggcggttttcgctacggtaggtcttggaggtggttagatgttaattggtcagcgcttaaaacaatttcgattaggtgcggggtattcacaacagacgcttgcggataaacttaatgtttcacgccaagttatttctaagtgggaaaccgacaaaagtgtaccggatttgaacttattagtcggacttgcacaactttataacgtgagcttgaacgagctgttagacgttgaaacagttaccaaatcaggttcgctgttaacgcgattacgacagcattggcatttatctgaaacggaagaaacagtgccgttatccgctttgggacagcttatccaaaaaccagagcggtactatgttgacttaaggcaacagtttagtgaaacgttgacagatgtcgctgttatcagggacgggcaaacgatgccgacacattggcggcaaacacggacgccttatttaataacgttagcaccacatcaaatcagtttgaaacagacggattatttaaaagtgatggccacgaagatggttaagcaattggcaacaacggcaattcgtgctgttcattatgcagtcttccaaactgctggaccaacagcggggattgggggactaccaggtatcggtcacgcttatcgcgccattgtcactattgatacaaaacaatccttagtgccatattatgtaaccaatcaagacttttatcagttggcaaaagtcttgaaggcctatgcgcaagaggaacacattcaatttgatgattcgatgggggtactaccgtttttcatggcccatgacacgacagcgtgttacgattatttagaaacgcattacagcgaattagcgaagaaagtgggctttccaacagaaagtgcaggacaggcggtttatcgatggtagatgagacaacgaaaaatgattttaaaatagcgacagatggcgttcaagcttatcattgctattttgggacgccaactgatgatgatcaaatttggtttgaactcttaacggttggtgttttccaggtgggtttaagttggaaagtagccgctagtaaaattccaattttacggcaacaaatggcgggaatggtgattgatcgggttgcacaatttgatgaatttgatgttgaacgacttcaagaagcaccggatatgattcacaatacaagaaagattcgcgccaccatccagaatgcgcgggcgattcaaaaagtgcaggatgagttcagtagtttctcagcgtacttgtgggcgtttgttgacaatcaacctcaattacttgattcacaaatggctggggtctccgataaatcagcgccaattagtgcccgacttgccaaagacttaaagaaacggggctttaaatttgtgggacccgtcgttacgcatttatttatgcttgcgggcggtttaatccagttgattgatgaaaaatagcttttaaaaggtaaaccaaaacggtttacctttttttatggcattcatgtcagaaaacctaacatgaaatgttgaccggtaagaagtcgactggtaagataaaacgcaagtgaggtgaaatagatggctgaaaagcaattaagacgaaatttagcggttttaccgattggaacggtgatgaagttaaccggtcaaacggcgcgtcaaatccgttactatgagagtcaagaacttgttttgcctgaacgtacgccggggcaccaacggttattttcgctgaatgatgttgatcgcttattagagattaaggattacttagcagaaggcgccacgatggttcaaattcgccagatctaccgcaagcaagcacaaaaaatgcaacagcggcatctgaccgataccaaggcccgtcaattgttagcggaagaaatgctttcggtcggcggattagtaggacaacgaccatctatttcacaatcatctaaattatattaaggggcgactagattaatggcacgaaaaatgttgacagcagaagcaatcaagcaattagtggatcaagaaaacgttaagttcttaagattaatgtttacggatattaatgggattatcaagaatgtggaagtcccaatcagtcaattagacaaagttttaagtaacaaaatgatgtttgatggttcttcaatcgacggttttgttcgaattgaagaaagtgatatgtatttgcgtcctgatttaagtacttggttgattttcccatgggaagctgaacatggcaaagtagcccgtttaatctgttccgtttacactgctgatggggaaccattcttaggtgatcctcgcaataacttgaaaaaaatggttcgcgaaatgcaagataaaggcttcaaagattttaacatcgggcctgaaccagaattcttcctctttaaattagatgaaattggcaaaccaaccttaaaattaaacgatcaaggtggctatttcgattttgcccctgttgatttgggcgaaaactgtcgtcgggatatcgttttggaacttgaaaagatgggctttgaagttgaagccagtcatcatgaagttgcacctggccaacatgaaattgatttcaagtatgccgatgcagtcgatgcagccgataatattcaaaccttcaaattagtcgttaaaacaattgcccgtaaacatgggcttcacgcaacctttatgccaaaaccattacacggtgtcaatggctcagggatgcacatcaacatgtcattattcaaccaagatgggacaaacgccttcttcgatgaaaatggcaaagaacaattatcagaaacagcctatcacttcttagcaggcttattacgccatgctcgtgcgattacggccatcaacaatccaactgttaattcatacaaacgcttggtacctggctttgaagcacccgtttatgtggcttggtcaggccataaccgttcaccattaatccgagtaccacaatcacgtggtttatcaacgcgtcttgaattgcggagtgttgaccccagtgcaaacccatatcttgcaatcagttcaatcttagcagctggtttatcagggttagaacaaggcctttcaccagaagccggtgttgatcgtaacatttacagcatggatgaaacagaacggaaggaaaatcatattactgatttaccatcaaccttgcacaatgcacttaaagaactagctaaagatgatattattaaggattcaatgggtacttatctctatcaaagtttcatggattctaagtcattagaatgggcagcttatcgtcaacaagtttctgaatgggaacgtgagcaatatttggaactctattagtcgcaatttgaagctaatttttgtacaatgaacttttagaaatagaaagttggcagtgtatgaaaacattagtgattgtcagtcatcctgagatggctaattcgcttgttcagaattttctgaaggcgagtgcgatgccgtttcaagatgaagtgacttggcacgatttagcaaccattcaacagctggatgtcgccgcagagcaagctttattacgtgaccatgagcggatcattttccaatttccgctctattggtatgctgcaccggctagtctcaaaacgtggttagatactgttttaactggtgaatttgcatttagcgggcggatgcctctacaagggaaatcgttgggggttgttgtctcgacagggattgctggtaaacattttcaagctggtggcagcgagcaagcaacgctttctgaaattctacggccatatgaattggttgcacgaaaattaggaatgacctacttaccaccatttgcgattcatcaatttagttatttaactgaaacagcccgccaattattattagttgattatcagcggtatttaacgcaaaccacttttaactttgaacaaaaggtggcgtggtttgaacagcagttgcgacaacgccaatcggctgcgactgattcagagcagcagcagcagcttgcgttattggctgatcagttgacagaacaaggtgaattgttaactgatttaggttggcaagtgcaactgattcgccaggaagaaggcgaaggttaatgacaaatgaagaatggttaaaccaacaaattcaaatgctcaaacaacaagcaaccacgtatgaggatcaagctttctatgaagcgctcgcagaactcaatcaagcattagcaactcggattgaacaacgtcagggtgaactggacggccgtatctggaatgcgactaagtggtaatgattagaaaaagcccctctaaaatcgaaatctgattttagaagggctttttgattggctatttattgttgcattaaagatgaaatgggatgttcttgttgatattgttccttttcaatttcgttattagcaacagattctagtatgaaaatcaaaagtaataaactagttactacaatgccggtaatcgctaattttttgtaatccttcttaaccgttccaataattgataaaacgaatcctgcaatttcaagtagtgatggtatgatgagtcccaattcagaatctgctagaaacgaaaaaacgaaacctaataccgctaagcccaggccgattaatgttaatgaatattgtttctttgccatgataaaaatttcccccaaaataagtatattagtttttatatcttaatagatacaaaaatgaataaagtgtatctaaaatgacataaattcattagttagtatagcatacgaatcgtttgaattaaaactaaatttattttaaacgaacaaaaaaaccgtcgaaaactgatcgacggttgaattaattatgattttagtcaatataacggttaatcaatgtaacaaatgcatcaacaatcacttggaagaaggcgattgtatctggattagcaacttggccattgtcgtctaatagattcattacattaccgatgtaagcttcgggttgttgaactgttggcatgtttaggaaaacgagtgattggcgtaaatgatggttagcgccaaaaccgctaatggcacctggtgaaacgctgacgatttcagcaggcttgttatcccagacactcgcaccataaggccgtgaaccaacgtctaaagcattttttaagacggctggtacggagcggttatattcaggtgtgacgaataatacggcgtccatttgttgcattttatttctgaaagtcgtgtaggcttcgggtacttgatcaagatcatcatagtcttgattgtaaagtgggagatcaccaatttcaattacctctaagtgcatgtcttctgggaataacggcatcaattgtttggcaattgccttactaaatgaatccttacgtaaactaccaattaaaactgctacattttttgtcatagatgtaacctccaatattgaattgactacacttctagcatagcgaattccgccacattttggcaactaaaagggttagcggattgaatttaaatgggtattacaagtataataaacgtaagagttttcgaaagcaggttaacaagtgatggaaattaaatggcaagtcgccacacaacaatcacaaacaatgaaacagttccttctaaaaaatgggattagtcagcgcctatatgccaaaattaaggcgcagggtctaccggttcgcttaaataatcggttaagcagtcccgctgaccaagttcaaaacggcgatcaggtcagtctgacattacctgcagaaccagccgacgaaacggtcgcggtcagtggagttccgattgaagtgctctatgaggatgactactggttagtcgtgaacaaaccggctggcctggcaacaatccctggaccaactaatacgacagatacattgttgaaccggattaaaggttactggcaacaaaatggggcgatcgatttagtaccccatattattacgcgccttgattttgacacgagcgggattgtgttagcggctaaacaccaagtggcccaaagcttacttcaaccgcagattgaacaacatcaattgcaaaaattttatctagcagttgttgcggggactggactacctgaatttgggacgattaaagcaccgattggccgtgtcggggttgaaccacgtcggcgggtgattgctgacggacaaagtgcttggactgattattggcgtttagcacaagatgagcgcttaactgtcttaaaagtccagattcacaccggccgaacacatcaaattcgtgttcacttgagtgatttaaatcatccgttagttggcgatcaactttatgagggcccgcttggttggggaattgaccgccaagcattacatgcgtaccaattaacctttaatgatccgttcagtcaacagaaaagacagtttacagcgccgattccagcggatattcaaatgattttaccaactaaaattaatgacaagctgtaagaaagaagtttcaggatgcgaaaattaagaatagtattgatttgtgttttttgtttagtccttggtggggtaattgggacactgggtaccactagagttgcggttcaaggcctggttagcccgcaaaaagcggatcgccaaccgattgtttttgtacccggcagtggtggcactaatgatcggttcgatcaactttttaaaacagttaaccaacattatcgccaacatagtattcttaaagtggaagtgatggcggatggtcaagtcaaaacgaagggccagattgtttggcgcgataaagtccctttaattgtggtcagttttgaaaacaataatgacggagacgagaatgtctttaagcaaactgaatggtttgaaaaggcaatgcaacagctaactaagcaataccattttaagaaatttaacggtgtcggctattctaacggcgggttagtattaacgcggtatgcagaacgctatcctaaagaggcgcaattaagccgtttattaacgattggcacaccctataatgggttaaatgccagcatcaaagatgaaagcccaatgttaacggatttaaaatctcaaaaagaacacctttctaaaaaaatggttgtctattccgttggtggcacaacgactggtggggatgatggcattgtcccagcttctagcgttgcggcaggtcgggaagtcttccaaaatcaaattgcccattacatgtcgatgtttgtgagtggtaatgatgccaaacacacaagtttaccggaaaatgaaacgattgtttatttgattgaggaactaattgtgcaacaaccggtcgatccgcagaaaccactgagtgcaaaattaaaatagaatattgaaaaagggtagggacaaaaataacttttgtccttaccctttttagattattcaccaagcgtgttcaataagctgtgtgtgatgaagaagccgccgattaagaccactaattcggtgagcggcacactgagccagacacccgttaggccaaacaaggctgataataataagacgctcccgattaggaggacgtaaccacgcataatcgcgacgaaaaatgatagtcgtggttgggcaatggccgtcataaataggttgttgacgatattcatacttgagaagaaaaagctgatgaaaatcaacggaataccggcggccgcgtaatgaacaagtaattgattgtgatcatggttgaaaatggcgatgatcggttctttaaatccaagcaggactagatacagaccagttgcgatcccgagtgctgataacaaaccgattcttaaactagttttaacgttatgccagtttcgtttaccaaattcacggctgacgattggttggaccccaacggcaacaccgttaaataacgataaaccgacaagtaagatattagcaataatgccgtaagctgcgacggcgtagttatcggctaaatgcaaaataacgatgttgaagacgaaaatgctaacgccggtactcatttcggttaagaaagaaggaaagcccagttgaacagctttaaacgttggtttgaagtttaatgtcagttttttgagggtgagtaaacggtctgggtgatgacggtgtcgcgttaaaatcaaaaggctgacgagcggtgaacaaatcgttgcaagagccgcccccatcatgcccatgtgtagtgggaacatcaataagtagtcaaaaataatcacgaataaactttgagaaagggtcgcaatcatggttagatgtggattgctatcatttcgtacgaaactgaggactaagttattgagaataaagagtgggctcccaattaaaataacgcgtaggtaagccaagctaggcccgagcgtttcatgattggcaccgagtagatggaggagtggatggataaaaatcaaaccgagactcatgatgattagtcccaataaaatgccgaaggagaggacttcagtgaaaatcgcctgactcttttcgggatggttaaccttgttaattgagaaaattgttgcgccaccaataccgagcatcaatcctaagccattaaaaaggttgaaaaggggtaaatcgatattgagcgcggccaagccaattgggccgaccgcataagcgatgaagtaggtatcggccagaatatagatggaaaggccgagtgaactgaaaacatcacgaatgatgtaaccagtcagttcttttttaatctgtggtgagtttgtcaaagtggaacactcctattcaattggtagtggggtcgccagtaatgtcgcgacgaaatcctggattggttggggtaaacccttgcgattaaccaggtaaaattggcgttggtactgtttggaaagcggtcggtagggaatctctggataatcaagtaatgcggcacttgaaatcaatgattgacctaatccttgtcgtaataattggacgataatggcattacttttaaccgtcatcacgttatcgagcgttaaattattttcctttaaataattcatcgtgtaatgatagacgccggaaccattttcacgtaagagccacggttcggttggttgaccggctaaaactaattgatccgtttgtagcggcgtgcgaacgatatctttttccgttaatggtttttcgataaagccaaagtccaatttgtgttgcgataactgttcgataatctgcgaggaatttaacgtgcagatttcaatctctaaagcatctaaagcatcacggtggcgactaagtaatgccggtaagaagtaggccgccgtggtgtgtgaagcagcaatccggcaggggattttagcctgcctttcttgatgttgtagttgatggagatcttggtgccataaatccagtaattgctggcattgctcgtagaataaatccgcctgtttggtgggcacgatttgctggcgaccattgcgttcgaataaaacaacatcgagcgactcttcaagttgtttgatttgcactgaaacggttggttgcgacaggaaaaggagttgggccgcagtcgtaaaatttttagtttcataaaccgtcttgaaaatttcgagcgttttaaacatcataccacttccattaaaattattaataacaactattataaagatttattttattaattgaaagagtttcggtatagttaacttattgatttgagagggagcgagtaaaatgcaatcattgattaagaaattacctggctttattgtatcattggtcatcgcgattggaagctactatattgcacaattatggttaccaatgttaggtggtgcaaccatcgcgttatttgttggcattattttaggcaatacctggttaaaacaaccgggcttagccgcgggcacaaaattttctgaaaaaagactcttggaatattcggtgatgttattaggcgcgacaatcacattccaaagtattcaaaaaattggctggcaaggggttgttctaacggtcttgcagatgagcttaacaattggctttgccatctggttgggccggcgcttgcgctttagcgaaggcacgtacttattgatggccggtgggaatgcggtctgcggttcttcagcaatcggggcgattgcgcccgtgattgatgcggataatgaagatactgggattgccatcacaatggtcaatctcatggggacaatcttgatgttggcactgccagttttagggacactgttatggggccatgataatcttgctcgagggattttaattggtggtacggtgcaatctgtgggtcaagtggtcgccagtgccaccatgattaatcaaggcacagtcgtcacagcaaccttatttaaaatcttgcgaattatctgtttagtctttgtagtgacgggttttggttatttacatcagaagaaacaaagccaagcaaccgatacgaagttaagccaacaactattagctaaaaagagtagcttagtaccttggtacgttttaggctttttaatcttttgtgtgatcaacagcctacatcttttcccaggtcaattcggaacaatctgccatttcttgagtacgtggtgtgaaatgaccgccttagccgcaatcggcttacggttaaacttaaaaacactatttaatcaaggcaaacaattgttattttatgccggcgggttagtcgttttccaagttgctgctgctattttattaattacgatcttattctaaaaaaacaccatcaatgtggacgcaattgcccagaattgatggtgtttttttgatgaaagtcattgttaaccttcatagcggcccatttgagggagattttgaagtcgtttaggtgtgtggtgtgagtttgcgaaggcttctgttaagtcttgtccagctctcaagcctttaaaatgtttgccaccttcccaaggtcccattgcggataggtcatagacgataccttcaacagcaacgtaacttggttggccatcttgaccgttatattgtgcgagtgtttcttttgtaaaaattttatcagtcattataaaaaccccctaaatattagcataactataacgttttcgcgaagatttggcaacaattaagttgtgcgcggcatagttaaatctgacagtccactaagaaatagttttcatcgttaggcggaccatgttaatattaagaaaattaatgcgttaaactaatcacatgattagtaaaatgtaaaaatactttattgggggaataaaggtgagagttaaaaacaaggtactaatgggtgctttcttactactaacggtgggactagtagggtgtcaggacaacactaagcatgcaaaaaaaatagagcaacatgtcgtgtcacctactactaaaaatggtcggattaagattattggacagaactttgcgggtagttatcaaggggctggtacgaagacggacccaagctacgagtatttaatggcgtttaaagcagatgggacgttcagacaagatattactgcaacagatggttattatgccaagtttgtagagcaagggacctacacaattgataagcagacagctaaaattgtgattaacattcagcaagttgtggaagtcacttacgcgactgaatatgatttatcccatcaacagccaccaattagttatgattatcgtaaacaacaaggaggcaaggctctgacagcagcagaggataaaccgattaatattctaattaagtcgaattatttacagggaagtgttaatggcgttcagttgcgaccaacaaaacatgcgatgatatcgttcaaccattttaagacagccgcgcaaaatgaagttcaatcgcaaaaaagtcgtaagacgacaactagcacgtcgcgtcaaacaacgaataccacaaaagtggaaactgcaccaactggaagtagtgaattaacgcagttgaaggcagaagttgcggggcaggatccgagtttaaaggtgacgagtgagtcggttattgatacgaatatgggagttgaactgtataatttattggttggaaaaagaatgaatgtaatgtggcgtgtctggcgtaatagtggcgttgatgatgatgcggtaataactttagaaagtgatggtagttataaattgttctttcaaggcactgccacacccgctatcagacgctttggtgacgttgctgtatatggctttataagagaaggtccgggcgccaatccaacagattatgaaaaagaaattgttgatttaaaaaatatgcgggttattggaacgacaacaatcgcaccaacacatattcatgaccaagggggagcgtcataatgaaaaaaatgaaattagtaatgctgctggcatttgctagcttactattggttgcatgtagtcgccaagtgaagttagctaaacagattagtcacgcacaacaccaaactacaacacaaaataatgttagcggtggcacttatcacgggacttatacggggaataagtctcatgaagatccagattatgattatttaatgagctttaaaaaagatggtacattccggcaagatattaccgccagtaacggatatgctggtaagtttgttgaatcggggacctatcaggtgaataagaagacgcaacagattatcattaaaattcaaaaagtagttgaagtcacttacgcaagtgatagtgcgcttaaacaaaaggcaacgccaactgcatatcaatatagggacgaacatcagttaacagcagctgaaaataagccaattgaaattaaaataacgcctaaatatttagaaggttcaattaataaagttaaattatataaagtgaaaactaaagtggttgatttcgatcaattcaagacacaacaagctaagcaatatcaatcaacaccgaaagtggtcgcgcaaaagttgattggtggtaagaattttatgggccgaattgataagaatcaggtttggctaacctttaatcaagatggtacctttaactggcaagcagtctacaattcctatggtgctggctcagtagcctatatgacgggtcagtaccatttagatgatcagggtcatattacttttgatcataaccagggggatatttatgacatgagtcaattgagtgttgcgggtaaccagtaccgtgatcggtcaagtgtgtcagtgcctgatgaacgctttaattttgcggtttatgataatcagcttattatgcggctatcggattcggtcggtgggtcggaagcagcgtaccaaacaccggattcaggggcttataaaacaagtacagtgatgactgaatcagcaaccaaaacgccaacttatcttgaaaaacgaggcacaatgactaaagttaatccgcttatcagccaatttgaaaatgcagaaaattttggtaagtgggcgttaattgcctatcggacaccgagtttagcaggtatgtggggtcgcccccaagcatttggaattaaagcgactgatagtaacgtgtgacacaaggggggattcggtttgcttatctgacgacgattgaagatgtttcaccaaaagatgaacaacagattgatggcgttgaattaattggtttaggagaagatagcaatatttatctaaatcccgggacgggctttattaaatcagcgaagtttacagactatttaaatgctgagaaggttgatgctgctagattaagtgagtttgatgcatcagtaagttatgatgactaagatagtaaaaaagaaccgccaacaattattgttggtggttcttttttatgggattaaattgatggacccgaccagattcgaactggcgacctcctacatgcgaagcaggcgctctcccaactgagctacgggcccaaacgcttacaaaaaatattttagcactttcagctaaaatagcaagcgtctttaacgacgaggcgatgtccggaggttgttgggcttgctgcctttaattgtccgttgcttaaatgtcgtttgttgttgatcaggcataaacttgaaatgttgcattttgccagcgtaaggtttcccgctgacacgaatttttagccagtcttgcatggcgacaatcatgccatttaatttggcagcttgttctgagttgccttgtttttggacttcaacggtgacgtcattggtgagataagcgagtaatttttgatggtatgcgactaattcttcagttagtggtgcttggttgtattggttgaataatttttggacaaaacgcatggcatctttggcgttttgaggttggtaaaaacgatcttgctcgggcattttaaaaccttctttcaaatggtagtatatctgattttaatgcttggaacaactttggtatactgtaatctgagattaattagcggaggattaagcatgtttaagaaaaagagcgattggttcttagtattggcacttgtcatgatggcaattttgttttatagctcatcaatgacgtatcatgaacaaacatccgtcccacttttggaacgcgtcttgaaaaatgaaccactaaagcagtggttgagtcaattttccttccattatgcaggcagtgaacaaagtgttaaggcaagtggttattttaagtttgtcgaattctttgtgcgcaagggtgcccacttcggcacatatttcttattagcgttatttagttatttaggattacgcccccgaattgaaggtgctttcttagcggggatcttcagttggttggcagcgactgggtatgcggcaaccgacgaatttcaccaaatgttaacgggtgatcggacaccactttttcaagatgtcatgctcgatagtgtgggcgctttatcagggattgtcattatgagtgttattttatactttacaggtcgtaaaaaacgacgataaacgtgactaccattgcttttgagttgataatttgctatcatagataacgacttagtaccagaattctataatcgaaaagaggagttagatatgtcaggacattcaaaatggcataatattcagggtcgtaaaaatgcacaagatgcaaaacgcggcaagattttccaaaaactatcccgtgagcttttcatggctgcgagaagtggcggtcctgacccaagttctaacgccgcattacgtttaattatggataaagcacgttcagctaacatgcctaaagataacatcaaacgggcaattgacaaggctgacggtagcgatggcgcgaactacgatgaaattacttatgaaggctacgcaccaggtggtgttgccattttagtacacgctttaactgacaataagaaccggacaagttcagacgttcgtgttgcatttactcgtaatggcgggacaatgggcgctgctggttcagtggcttacatgtttgaccgtcgcggttatatcgcgattgcacgtgaaggcttagatgttgatgaagatcaaatgttcgaagacattttagaagctggtgcggatgatttacaaaccgaagaagatgtgtttgaaatttacacagatcctaaggaattggcaaatgtccgtgatattcttgaaaagaaatacactttggcaaatgctgaattaacaatgattccacaaaatacaacaccagttgatcctgaaaaagtagaacaattccaacgtttagttgatgctttggaagacaacgatgatgttcaagatgtttatactgctggtgaactaccagaagaagaataatattattctaaataaccttaaaccaatattgttggtttaaggttattttttttgcaaaaaaatatgaccatccctagcgtaatcttaagtaacaacttaaaagaaaggtgatggcatgtcaactgaagaaaagctaacaactttattaaagcattgtgctaaacaacgtgttcaagatctttattttacaccgacaataggtggctggcgcttgacggaacgtcgtcagagcgatttggtcaccaatcaagaattggataaaccgactggaacgcgttatttaaatcgactgaagtatatggcggggatggatatcagcgagactcggcgtgcgcaaaccggccgctcggaattacagctagccgatcaaacaatttatttacgcctagcgacggtcggggattttttaaaccgcgaaagcttggtcattcggtttatctatccaattggtgccatctatcattgtgatgatcaacagatcttggcgcaattaacgcagatgagtcgacaggcgggcttaattcttttcgctgggccgactggttctggtaaaacgactagtctctatcatctggcccaacaatcaatgagtgccaagatggtggttgctattgaagatccgattgaaattgttgcacctgagtttttgcaactgcaggttaatgataatgcgggattgagctacgccgagctattaaaaattagtttacgactgcgaccggatacgctgattatcggtgaaattcgcgatttagagacagctcaatatgcaatttctgcggccttaagtggccacctggtattgagtactattcacgctcggagtacacagggcgtggtcgcgcgcttattagatcttggtatttctgagctgcaattgcgggcctgtctaacgggaattgcctaccaatcgttggtgacaaaagacgacgttgtgcaagcccattatgaattattaactggtccagattatttctcaaaaaaagaaggtggttgcgatgtataagttacgacaacaagcgcaattttacgctgatttcttgcagttattggggcggctattagagaacggtttttcattgcaacaagcttttgccttcttaccgattgtcttcccaaaacaacgacagtggttaaatcaggtgaatcaagcccttgaaaaaggcgacagtctagcagtcagtttagcgcatgttgattttccaactgattatgttggtcagattgaactaaccgaattacaaggtaatctcgggcaatgtttatggcatttaggtcagattcaaagtatccgccaaaaacgccgccgagaaatacgtggggtactagcttatccgttatttcttttggcttttttagggggcttaatcggtttattacgccattatttattacctgagattgcccagataacgcccgagtcaaaccagacaggctcgccgcttaatcgcatcatattgtgggtttttttgttagtgctagtccttttgataatgggcagcggtctttttatggtttaccgccggttaccggttttagttcgattacaaaaagcgttcaagtggccaatcattgggcgtgatattcagcagtattatcattattgtttattatttgatttgagcacttgtctgcaaaacggactcaagttaacggaaatttgtgctttacagaagcaactgcaacaaaatacatggctggtaaccttggtagcgcaattagaggttgtactcgcttcggggcaatcattggatgcttatcttagtcgctctgcattttttccacagtcgttacgattggtattggctaagcataatctcacgcaacagacgaccgatgagatcaccatgctagctaacctgcagtatacggaactacagaagcaattacagcggaaagtgagctggttacaacctattttatttatcttaattgggctcattattatttgtacgtatctcagtattttattaccgctgtatcaaacaatggagggaatttcatgaagaaaaaaagaaaagcttttacactaattgaaatggtagttgttcttgccattattgcgttactaatcttattagttgcaccaaacctaggtgctcaaaaacagcgcgcggagaagaaaacggatcaagctttggtgacgactttgcaaacgcaagttgaattagctagcgacgagattggtcatcaaattaagagtctagacgaattaacggataagtatatttcaaaagaccaattaaagcacgcaaaggagaaggggattacaattgaaggcggcacggttaagcaaaaatgaaggttttacgttgattgaaatgtgcgtggtcttagcgattgtaagcttattaagctggttgccgatttatcagattaagcaatatcgtgcgcaacaggctgagcagttgtttctacatcaatttgaaacgagttgggatgcagctcgtcaatatgtggcaattgaaccgcgtgccgtccgtgtgatgtgggatgcaccaacacatacgatcacatttaaaggtgctggtgagtcatttagaaatcatcaactcgtattaccagaaactttaacagtgagtaacccagccgaatggcatttaattaatattactcataataagggtattaaaccgcgcaccttaaagttaaaatcaacgcttaataatcgtgaatatcagtataaagtccagatgatgtggggggtattacatgttcagaagtaggccggctttttcactcgttgaaaatatcatcgccttaaccttagtattaggggcttgctggctattaacggtaagtctactacactttaagcaacaacaaacgcttaaacaacagcaagttgcacaacaggcggttctagcaatggccgctgagcagttgagagcgcatcagacagtgaaaaaacgctggcaaatggggcgaacaatctatacggtgacggctaatcagcagaaattaaaggtaaccacaaaggcaggtgagtcggttgcgattaattggacgaccgattaagcattcagcgttcacgctaattgaaatggtgatttcaatggcgattctaatcctgacgagtcagttactggtggcaacggtgggtgttttacaaaaggcaattaaagtgacacaacaacagcaaaatacaatcaattggcatatcagtacgattcagttagatcagtttttagccgatgcgtattttacacatcatcaggatcaagatggctccaaaatcacttttcgaaaaccagacactaatcagtcaggggaggaagcggagactgtttactatttaaaaaggatgaaaaatgaaatggttgttgtcagccaattaaatgggtatatgccattattaggcaacctcaagcaacttcaacttgactaccagcgaccgtttgttcaaatcgatgcgacttttacggatcagagtcgctaccaacacgaagttttcttggaggaacaagatgaacaggctaaaaaaaagacgattaaaaccgattaaacattcggcggttgcattacttaacgcgatattaatgctgacattaatcagcgtcgtattagtaggtgtgacacatagttatcaacagcaacaacagagttatcggtatttgctgaatcattatcaagctaaaacactttatgagctgaccttggctagtcaatccaagactgatttaaaggggattaaagccacaacaggtgaaagtaaaattctaaggaaacagcatcaaatcaaggtgacacttaagaatggctatcagaaacagtttgaaataaaaaatataacaggtaaaaaataaaaattccatttgataaagcgcttactatagcttataatttgtaatgtaaccatctgtattacttgcgttgatgttggattaccgctagaatataacagaatccaatgaatagaggtggctattttgcctaagagtgctgtagaaacgttgtttgacttaattgatcaaacaacaacgttgattgaacagaatttagaaacaacctatttagatgcattgactgaatcaattgccaatatcgctgatggtggtcgtgtgaaggttgaagataatttaccagatgcgcaaactgtcgcacaacttgaaacaatttacgcaacggttaagcttaaccagtttgatgcggagaccattcgtcaagccttacaactggcaaccttaaaagggcttcgtcaagttaaagtggagcctaataaacaaatgacacctgatgcaattggttatttagtcgcatatttggcggaagtatttggtggcgctgatcaaattaagacagtgttggacccagtgattggtacaggtaatttattagcaactgttatgaatcatattcaaaatctaacgggtaataagctccaaggttttggggttgataatgatgatagtttgctagaattagccggtattagtagtgatttacaagggttagacaccactttattccatcaagatgcgattgaaccattaatggttaagccagttgatatcgcggttgccgatttaccaattggtttttatccaattgatgaacgagcagcagattttgaaacacatgctgctagtggacactcatatgcgcatcatttattaattgaacaaacgatgcattatgttaaagacggcggttttgggttcttccttgtaccaaatgttattttggaaacagatgaagcgaagcaactggtaaaatggattactaaacacgtctacttgcaaggtttattgagcttaccagttaacttgtttaagactaaagagggtcaaaaagccatcttagtcttacaaaaacaaggtgctggtgcccaacaagctaagcaaattctattaggtgaatttccaaattcaaacgatcaaaaagcgttcgctgcgtatttacaacagattcggacttggcataaagaaaatattaattaatcgaatagaaaaggtgattagatgtcaaaaattttagcaattaatgccggcagttcaactttaaaatggaaattatttgtaatgcctgaagaaaaggtgattgccaaagggatggttgatcgtctcggcttatccgattctgtcttcactgttaaatatggtgatggtcaaaaatatgaaatcacgaaagatattgaaacccaagatgttgcggttgatttattacttaagaagttaatcgaatttaagattattgctgaatattcagaaattagcggaattggtcaccgggttgttgctgggggcgaagattttaaaacatctgccttgattactgaagcatcattaaaacgtatcgaagaattagctgaatatgcaccattgcataatcctgctgaagccggtgtgatccgcgctttccgtaatattttgcctaatgtgccacaagtggcagtctttgatacctctttccacacgacaatgcccgaagaaaactatctttatagtttgccattagactattatcgtaaatatggggctcgtaaatatggcgctcatgggactagtcatcgttatgtctcacaccgtgctgctgaaatgttaggaaaacctttagaagatttgaagatgattactatgcatcttggtagtggcgtttcaatgactgctatcaaagatggtaaatcattagacacttcaatgggcttcacaccacttgctggtgttacgatgagtacccgttctggggatatcgatgcgtcattagtcgctttcttaatgaagaaattagatatcaaggatccagaagagatgattgatatcttgaacaagaaatcaggaatttacggtatttcaggattatcacctgatatgcgcgatcttgaaaagacaagagaagaacgcccagaatcacaattggcaatcgatatttttgttaatcgtctaatcaagtatgttggttcatacgttgcgattatgggtggcttagatgtcttagtgattacagctggtatgggtgaaggcgatattttaatgcgtcaacgaattggcgatcgccttagctatttcggtgttgaagttgatccagaacggaataacgtgatggcacaagaacggattattagtactgatgattcaaaagttaaggtgctcttagtacctacaaatgaagaagtcatgatcgccagagacgttatgtcagtcggtcaaattaaataagtttaaaaagtgatcagcgtattgctggtccttttttattggaggttcaaagcaatgtcgagttttacaattttttatagcatcctagcaatgtctttattagtcatttggctagtcgtgcagtttcatatggtatatcgcgctaagagtagtcgcgtgatgcgcatcattttaacggtaattgcaattgggttactgattgccagtgttgttgtcacgggatcggtagatgataaactgaccggtgttgcgtcggtcatcatcttgttagtcttcgccttttggccaaaggggtttactaagaccatgctaattgctaatttaaatacggttcgtcaatttgccgcaatttctaagattgaattaatcacaaaagaggccgaaacggtcgtgcaagtgtttagcggtcaaattcaaattacgacgttaaagtttaaattggatagcgcaacgctagctaaattcctcaaagaacggttccctgagaaacgattagtggttaaatcggcgtaatccttttatattacgcgaatttatgataaaatatgctatgcatatcggggccgttacggattcgacatgtgtaggtgagcgtgaattgcacttcgtaggttacgtctgcgttaacaacgttacagttaattataactgcaaacaataacaattcttacgctgtagctgcctaaacaccagcatagcgtgatccgtctgacttcacccaagggttagatccgggtctcaaattaattgggttacgttaaatgccgccgtttgaagtgtttaaaagagattttcaagctagttagtccatccgagcctctgttgaacggcgttttgggctagcgaatttctaaatagttcgactatgagtgtagagattgacgtggcaatgcgcatggacgcgggttcaacccccgccggctccattggataaaacatgggttaagccaattagttggcttaataaaaggcatttaacactaccgtaacggtgttagatgccttttttgttgcaaaaaaataacagccaccagtgtgactgttaaatcaattgcttatgcccaacgatttgtttttgttggtaggagcattaagatgtagaaccagattgtcccgatcagtggtacgaattcaatgagaacccaccaacctgagcggtctgtatcgtgcagacgacggattttaacggataaagttgcgatccatacaatgaaaactacgatattacggcccatcgaaatgcctaaatcaccaatgttataaatttctgagattggatgcccggtcattgcctgaataattccaataataatgccacctaaaatataattaataataattggccaccaaaaatcgggacgatttgaggtccccgtgaaatcaagaatacgtgcccaatatctttgatatgattttaccatgataaaagcccctttccattaatcagcgcttaacgtttttaaacgataagaaaaacgctttgctgttaataatattatggcatattgcgtttactaattaacagtttttagcttattaagcggtattaaatgatgaatgaagcgagaatgtataataaccaaatgtggattgggtagaagaagtagaaaaacgacttcatactccgacctttttgaccgttgtacaacaggatcggaataatcgcaaaaatcatcatccattgggtattagtcgttaataaaccagtaaaggtaaaacctgagttagcgcctgcgttaataacggcaaaacaataattgtcaggcattgcagtaaccgattattgcggaaaaggtaaaagaagacaccgatataaagaaaaatagaattttcagcaagtgtgatggttggaataaccatgccgatatttgctgctaacattgctgttttgggattaactagtaacaagataacgagtaccgacatcatgattggcacgataatagctaaaaacccaattatcatttgcttggtattatgggcccgacgaccagctgtgatttcttggatcccatacattgctaggacggcaataaataaatctgtgaagatgttattggataaagcgatatcaccaactgtgaagaattgctgaatgagtcgatcaccaaaattcatcacccaaaagccgatgagcagctgagttagatagcgtttttggttacgtgtgtgcgtgaaaccttcaaccgccatgaaaaagaaaatagtagcgactggtctaccgaaccaatcgacccagtcagggacgcctgctccggcgaacatctggtggatatggtcaacaaacatgagtaatattcctagaatcttgatatcaaaattattcagtatctgatgtgattttgtttgcataaggtaactcccctaaaagatttaatgggtatattatctcgcgttttaagtttgatgataagcattaaattctgggtgacaattctgttagacaatataaaaaagcaaagtcccaaaaggctttgcttaatgtgcttattcggcagttttacttgaaccgtctgcgtaatttaaagtaacaccatctgcaacgttgaagatataagtgttaaattgaatgctattatcgccaattgactgaccttccatttgaaccccacgagccagtagttcattccctctaaaaatgggtgttacgcgataacgcacgtcacttgagggatgctttttaagataggctgcaatatccgactcatgagccaacatttcgggggcattcaattggcgggtaccggtgatgaggtttttagggttgttgttttcaccagtcagttgataaccgattaaatgactacgattatagagccaactggatttcacccgtttgttacgccagccagttgggttccaagtaaggccttcccgtttggcagtgggcatcatacttttatttaagagtgcattggcagtgccggcccgatttaattggtcgaggttactaaaagtctgccagggtccatttgtagtggcgagatcagccgttgtaaaggtaggctggttattgttgacgataatttcgttatcaccttgataatctaatgttgccagctcagaagcagcgtgatttgttgtattagcgatgggggtattggtttcagttgccagtttagcgagttgcttattgagcttgttaatctgacgttgtaatttactgattttcttgccggtctttttattcttctgattaattttttgtgcttgttgataatccgcagtccctgaagcggcttgggttggttctggtgtgatgagagggctacttgcaagaagtaacccgataatgagggtggtggttgcttttaattttgacatgttaatcctcccagccgcaaagtgtatagccttgtgcttgtgcttcggccagagtcatggttgttgtactcgtggcacgctttaggccgcgacagttcgcatcaagatggtattttttaccggcgttgggtgccactgtcaccatttcttcagcttgattagtggttgtttgggttgtatcaaccgtggcagtcgattgcacactactttcagtagccgcttcttgtgaactaacatgtgcttcttgttctgaaaccgcgattgataagctgctagcttcagattttttggctgctagttgttttttaagtgaggttgagttggcgagtgcttcttgtttggcccgttggccttcttttttcgaaacgtgctgaacctttgtttttgaagcactcgccgagttaataagtgtattagtggtgcctaggccaatgattgccacaagcaaaaacaccaggctcaaccagaagcgacgatgataagggtgtttcgtgaaataataaacgctggtgatgatactgatggttaaaagaatcgtcaataagattgtcattaattagcctccaaagcaaatgatttagttaattgtataacgggcttgatttgaacgcaatcaaccactaaaaaagcctcagtcatcagactaaggcttgtgttttaatttgattgtacttctaatgaaacaattgtgctagtacggtagtatttatctggatgttcgtcaagcgttaaccaatcggcactggctaataatccggcgaggacattaacgggttggctatcagtttgttgattggctttagctgattgtaaagcttcttgatagcttcctgagaaaattgcttctaaatagaaggcttggtcttcatccacgctcagataacttgtatcgtttttccaagcgtggaaacgtgctgtttccggtaaagtaacggtctcgttatttgaaaaagtcattaaaaatgtcatggtaccacactccaattcttaatttaaaaatcaaaatgaatccaatctaagtataccatgattacgaaaaaaggccttctttttgacattatctactgaagactcgtaaaatgaagttagaatagtgaaaggggaaagaaacgatggcaaatgaagaacgattagatagtcttaaagatcagattgaaggcacagttaagaaggtcgtcgaagaagtgacccacgataaatcgcaagaagaagcaaaaaaagataaacaaaaagctaaaacgaatccagaaaaatagttgctaaaggcgctcactaaattaattttaagtggtcgtcttttttagtggcgtcattttaaggaatactgttcgcttttaagtgtcatgcttggtataatttaagggatagtcagaggaagtaggtacaataaatggattacgcagaaatgttagaccggcaaaaacacattcgtaacttttcgatcatcgcgcatattgatcatggtaaatcaacattagctgatcgaattcttgagatgacggatactattgccaagcgcgatatgcaagcgcaagtcttagatgacatggaattagaacgtgaacgtgggattaccatcaagttgaacgcggtggaattgcactaccatgctaaagatggcgaaacttatattttccatttaatcgatacgccagggcatgtcgatttttcatatgaagtgtcacgaagtttggcggcctgcgaaggggccttattagttgttgatgcagcgcaaggcgttgaagcccaaacattggccaacgtttatttagcagtcgacgatgatcttgaaatcgtaccggttattaataaaattgacctcccatcagcgcaacctgatgttgttaaggctgaaattgaagaaatgattgggttagatgcgtcagaagccgttcttgctagtgccaaaagtgggattgggattgaagaaattcttgaaaaactagtgacggatgtaccagccccaactggtgatttagaagcgccacttaaagccttaatttttgattcaaattacgatagttaccgaggggttgttttaaatattcgagtggtcgatggaacggttaaagtcggcgacaagattcgtttaatgaacagcggtaaagaatttgaagtcacagaagttggtgtgatgtcacccaaagcggttaaacgtgatttcttaatggtcggtgatgttggttatatcacagctagcatcaaaacaattcaagatacacgcgttggggatacggtcactttagctgataatccagctgatgcaccacttgatggttatcgtcatatccaaccaatggtttattcagggatgtatcccgttgataatgcgaagtttaatgatttacgtgaagcgcttgagaaattacaattaaacgatgcggctttagagttcgaaccagaatcatcgcaagctttaggctttgggttccggtgtggtttcttgggtctgttacacatggatgttgttcaagaacgattggaacgtgaatttaatttagacttgatcatgacagcaccatcggttgattaccacgttgccttgactgatgggactgaagaagtgattgataacccatcagaaatgccagaaacatcaaatatttcagaagttaaagaaccatacgtcaaagcgtcaatcatggtccctaacgattatgttggggctgttatggaattagcgcaacgtaaacggggcgaattcgtaacaatggattatttagacacataccgggttaatgtgatctacaacatgccactttctgaaatcatttttgatttcttcgatgatttgaaatcaaatacgaagggttacgcatcgtttgattacgaagtgacgggctatcgtgccagcgacctggttaagattgatatcctcttgaatggtgaagcggttgatgccttgagtttcatcgttcatcgcgactttgcgtttgaacggagtcgtgtgattgttggtaagttgaaagaaacgattccgcgtcaacaatttgaagtgccaatccaagccgctattgggaataagatcattgctcgatcaaccgttaaagctttccggaaaaacgtgcttgctaagtgttacggtggcgacatcacccggaaacggaaattgttagaaaagcaaaaggctgggaagaaacggatgaaatccgtgggctcagtggaagtgccgcaggaagccttcatgtcgattcttaagatgaatgatgaagataccaaaggtaaataaataacaaaagacctccgataatgatcggaggtctttttgttattgatacatatcgattagttttagaaagataacgaggataatgatgctgatccagaaagtgacgctggcgctttttctgagggtcgcgttatgtttataaaaggcgatgaaactcattacggatgagccaagaacggcaactgctgaacagaagacgataaataataggataatttgttgtgctgatgacatgcggatactcctttgatgtgttgacattacaaagtagtatatcaaaaaagtggtgctgcgagaataggcgacgatggttgatgccggtattgctggagcaggcatgctataatgaccacaacttagtgaatttggaggaaactatgatggaagcaatgcaattatcgattgaaacggtggctcgcgcccaagaacgtctgttagaagctttagaacagatgacactggaggaggctaatacgatgcctaatccgcttatcaaatcagtaacatggctcatttggcatacggcacgggaattagactatcagatttcagatttaaaagggcaaacaccattgtggctcagtgctaattggacaggccgttttgggttagcgttaccagatgatacgcaagattggcagcatagccccgaagaggcggccaaggtagtcgtctctgatcgccaacttctaatcgattacttgtcagaagctgttaagttaacacaaacttatctccaagatgtttctctggaaagtctagatgaagtgattgatgataattggacgccggcagtgacacgcggtgcgcggttagtttcggttattgatgatgctgtgatgcattcaggtcaagcggtgtatacaagaagattggtgattgccaaataaactgcaaaattatagatgagtttcaaaaaaagataaatgacaaaaaagggataccatttggtatcccttttttgtcatttagaagatagattacgtgctactatattgaatgtaattaattattaatatttgaaggaattatcttatgaagactaaattattctcagtagtagcagtagcagcattggtggcaccagccgcaatgacaatcggttcagcatcagctgatgcggtaacaccacaaacatcaaaagcagactttacggttgttgctaaagatccaactaacccaacagatcctgaaaacggtactttggttttaaaatcagtaccaagttttaacttcggtacaattgaagctagtgatatttatgctgggtttaatggtaaaaaagcacaagcagacggtactttagaagtatctgatacacgtttaggtgcatcagactggacattaacagctgatatgggtcaatttgccgataaagataaccaattaaatggttcaacgttgaacttagcttctactggttcattaggtgaagatttagcaactgctattaaagatgatgcaagtgctgttgaagttgttaaaggtaatggtgcccatggtgttgatacattcaacatggcggctgccgatagtaaattgacaatggcagctaacccagctgctgatttagcaaaagatgaagctttctcaacaacaattaactggaacttatcatcaacagccccagttgcaccagaagcttaatctagaaataatgagtcattggcgctagtgatcgtcatcgtcaatcaagtgaatgatgtgttggataaggggcaggcaaagtgatttgtccaccccttatttttataggaggctacgaagttgtttaaaaagaaagtattaatcacaatgttaagtttaatgtgtttattagtggggattggtagttttgcgcaagcggtgcatgctgaaggtgctgaatttaccgtaacacctgaatatgggttaggacaaacggatgctagtttgggttatttcgcaattaaagccgaaaaggggcaaacatatccaattaccgtcaacgtgcaaaatttaaatacgaagaaaacaaatgatttcaatgcacagcttgtagccgcctcaacgtcaaatagcggcagtattgactatacaccgacgcatcaaaaaatggtcaaaacaaaagcgccattgttacctgatttggtctcaaaagaggcccgcaaacaaagtttaacattagcgccaggtgcttcaaaaaaagtcacttttaacgttaaaataccccaaaatggttttaaaggaacgattcttggtagtgtttatgtgaaacgaacgtcgaataacgaaccacaaaagaaggggttcggcattaaaaatagttttgcgatgactgttccaatcgttgtgacacaggattttgatcagaaaatcacacctcgattaaccttaacgaagactaagatggattcatccagtggggtgccgcaagttgttggtcaaatcgctaatcatgaaccgacaatgtttggtcaaattaagatgcatgcttggattaccaaaaagaatcaaactaaaaaaatatatcggaagaacgcggaaaaattatcaatggcaccgcgctcaacatttaactatgcaattgagacgaataataaaattttgcccaaaggtcactatacctatcatgtcaaaatggtatcgggtaagaaaacctttaatttaaaacaacattttacggttgatggtgcgacacgggaacaagttaacaaaacgctaattgatccagaaaaaccagggataaattggtggttatggggttctctagggattttattattattagtgatagcattagtcgcctatttaattggtcgaaaaaggggtgtaggggaacatgacgagtagtttatcaggacgtaaagaaggcttaatgatgggattgttgttactgatactcttattggtaacggtagcgcaaccagtacgagctaatcggattgatagtggacaaagtaccgctagttttgcggtgcatattgatcaaaaaagaccaacgccacccgggaatcatggtcaggatgggggtgttgcacagccaacaataccggaaaatggtcaagaaattcattacacagcgagtggttcccaaaatgccactggtcgtttaccacaaacgggtgctataaaaagtacactattaagtttaatcggtagtgcgataattctattggtacttggctggcatcgccaacaatctaatacgaaggaggcggactacgatgcaaattaagcgcctaatttacgtgagtttggcggcaatgatgctcagcggtagtttgattaatgtgccggatcacgcttgggcggctgaatcagagtcagcaaccagtgtgagtgaaaccgaaaaagaaacatcaacagaaccaatcgatgtcaatacaaaaaagccagcttcgagtgagcaagcaccaactagtcgcagtgctgaaccagttggcacacctagtaatgcagataaaccttcaaaagatggatggagctttttattaacaatttttagaagagggtttagccgtcagccgcaagaagaagattattttgcgttgcaagatattgataaggctaaattctcagggatgagtatcctaacgaacttaggtaatgggttaggaaaagacattactgttcggcgttggcactgggatgctagtcagaacaactgggttgaagataaaaagcaacctaaagcaaagaccggtttgtctttgatcatgggctctttgggctttttagatattaatgactatgctttaaataagtcgggcaacttaggtgtcgggacatactattatcaatttagtttttcagatggtatctggccccttaataagactttctattctgatttagcgaaagtggggattacgccagaaccgaaaccggctaaatcgattaatgccgatacggataatgctgacggtacacctaaagtcatctattcggatgttgattatggtgctagagcgattattgatccagtcgattcgaccgatgatattacttggcaagcagccagcgctaaagatctcttgaaatttacaccaagtaatggtcgaaaaacatctttaatggccggtaatggtgaagtgggtagcgacaaacaatatgtaccagattcttattacgtcaatcaagtcaatcgtgatcctaatgtaccgggaattcccgctaaatttaagattgcagctggtaatgtagcggctaataaggatgtttatgttggtggtctgccagcctataatcgggcaatggatgccggtggtagttggtctgtgggcggcttgagtgatttagttaaagcaaccggcgcaacgagtgcttggcattatgcatggcgttttatggatagtactggtaaaacgattgagttgccagcaaatagtggcgtgacaaatagtagcggtgatattaataatctggctaatttaaatacggcacaaccgttaacgtttgctaaagatagccagtttatgaaacaggccgcagctgcgactgctagcggtaagcggtatcaagcgcagctaacactaacgacgagtgttgattctgaagaagaatcaagtaagaaagcagaaaaggtcgtcgttgtctctaataaggccgaactacaagttgagccctcattaggtaagttaacattggatcaagtgcctaactttagatttggcaatgttttagcgaaagatgtttataagggaacaaacactcagaatcagccatatgaagttagtgacacgttaaaaattaccgatactagagttaatccgggttggaaactaacggcaaagatgactaaaatggcatctaaagctggtcatcgattgaatacaacgacggttaatatgagtggcctaccaggaggagctaatttaggattggttgataataatagtgaaacaacgattgcatcgaccaagttatcaaacgcttggcaagtaacgggtaacttattgatggctgccaatccagatcttcaaattgaatctggtgaaaatttctctagtgatatcacttggacattaaataatacgcagcctgaagtaccagcagcataactaaaaaaagtctcgtaattggttgttaaatcaattacgaggctttttaattagtcgatatatttaacggctgtcccgtaggcagcgactgattgcatgtccgttccaattgaaccagagtcaaagcgcatcatcacaacagcatcagcacccatctcaatagcattttggcgtaaacggtcgattgcgacatcgcgcgattcggtcatcatttcggtataggctctaatttcgccaccaaccacgtttttaagtgaggcaccgatatttttgaaaacattcttagattgagttgtgaggccgaaaacttcaccgagcacttcgtattgtttgcccggaattgtttcggtagtggtaattaaaatttgattagtcattatgaaaactccttttttaaaagattaaaattattaacaatgtaatcagcgctggtaagccttgcaagaagaaaatctttttcgttgcggtaaaagtgccataaagggcaacgatgaagatgtataacattaacaatgctaagacggtttttaatgcggcaccggtcaataagcaattaacggcgatgattaagacaccaagcatcccattataaatcccctgattagcaagggcgactttggtgttgggcaaccgaacgaaatccaggggcatatcgaaggccttggcttttgtttgatcgttggcgaacatttcgagtcccataatgccgagatgttcgatggcgattaaactcgttaaaattgtgatgaataaagacatgatgaacctccttaagttccatttttattataacaaataaagcagttcaaatccgtcattagggtttgaactgctttaatttagtttagcgatcagcgtaaccgttaggatggtttaaatgccaattccatgcggtttcaataattgcttccatattatcatatttgggtgcccagccgagtgtttcgcgagctttgtcactagcagcaatcaaggtacttggatcgccggcacgacgaggggccatttcaagtggaatcgctttgccagttactttacgagcagcttcgacaatttccatgtttgaaaaaccagttgatgaacccaagttaaaggcgttgctgtcatgaccatcagcaagatattcaaaggccaagatgtgggcgtctgctaaatctaaaacgtgtacgtaatcgcggacgttcgtcccatctggtgtatcgtaatcatcaccgaagattgataattgatcacgtttgccagccgcaacttgtaagacgattggtaagagatgggtttcaggatggtgatcttcaccgattgaaccgtctggtttagcgccaactacgttgaagtaacgtaatgcgacaaacttgatgccataagctttgtcagcccatttcatcatggtttccatcattaatttactttcgccgtaagggttggttggtaattgtggatctgattccttgatgggaattgatttaggttcgccataagtagcggcagttgaagaaaagacgatgcgtttaacatcaaattcgttcatcacttctaataaggcagtcatcccataagtgttgttatcgaaatatttaagtggtgcttgcattgattcaggcacgattgaaaaggcggcaaaatgaatgacaccagtcacgtcttcttgttggaaaacggtccgcatggagtctttatcgcggatatcaccttgataaaaacgggctttttgattgatggcgccttgatgacccgttaccaaactatcgacaacagcgacgtcatagccgcgttggattaattgatcaacggtgtgggaaccgatgtagccggcgccccctaaaactagaattgacatggaatttccccctaagttgagaatacaggtgtactcttaatagtatagcatctatcggattaaacaaaaggcgaagttgggcgaaaagtgctaaattttgctataatggtttagttaatgactgggaagtagtgagggattaatttggaagcacaatatgaatggcaattaaaaccagtaccaactgaagatgaattacaaacaattacaaaagacaatccgctacctaaggctgcggcccaacttttgtggcaacgtggcttgcgggatgcagagcagatcaatgattttatgaatcccaatgtcggtcaacttcacgatccatacgctttgcatgatatgcaaaaggcgattgatcggattcaagaagcgattgtgaatggcgaaaaaattacgatttatggcgattatgacgcggacgggattactagtacgactttaatgaaggaaaccttagatgacttaggtgccgatgttgaagtctatgtgcctaaccgttttaaggatggctatgggcctaatttagaagcttacaagcgcttgattgaaaatggcacccaattaattgtgaccgttgataacggggtgagcggcctagaaccaatcgcttacgcgcaagaacacggtgttgacgtggttgtgaccgatcaccatgaattaccagcagaattacccaacgcagtagcgattgtgcatcctagacatccagaggggcaatatccttttggcgaactctgtggggtcggtgtggcgtttaaagtggcgactgctttattagaagagattccttacgataaattagatttagctgcaatcgggacggtttgtgatatcgtccccttagtcgatgaaaatcggacgttggttagcttaggcttacaacaattacaaaataccgatcgaccaggtttggtcgcattgtgtcaatcagctggcttagaacaagcgacactagatgctactaacattgggtttgggattggtccccgtttaaacgcaattggtcgtttacgtgatgcgacccttggtgtgcaattgttgacgacgcttgatgacgaagaagcagtcgaacaggcccaatttattgaacaacaaaataaaaaacgccaaggtctggtaaaggaaattacggaaatggcaatgacaattgctgaaacaccggaaaaccaagcgagtgccaccttagttattgcccacgaaggttggcatgaaggggttctagggattgtggctagtcatgttgttgaacagaccggtaaaccaaccttagtcttgacgattgacccggaaactggtttagctaaaggctctggccgtagtgtgacagctttccatttatttaaagcgttagatgcccaccgtgaattattggttcattttggtggccatcacatggcagttggcttgactgctaaggttgatcaattagcgctgattcaaactgcaatgaacgagtatgcgcaagttaatcagttagatttaacaggacgccaaccattaccagttgatttggcgctgacgttagctgatattacgcctgatttatatcaagcattgcaacaactggcaccttttggcagtgataacccagaaccgttaattgaacttagtgcaccccagttagccgatgtcaaacaaatcggtgctgatcagaagcatttgaagatgatggcggttgatcaacaacaacaattagcggttttagctttcaataaaggggctttgatgcccgatttaacagccgctgaagatgtgaaattagtcgggagtttgagtgagaatacttggcgtggccagacgacgttgcaattaatggtaaaagaccttgctacaagtgggcaagtcgtacttgatcaacgtagcaatcgtctgacgaagcaattattccaatcaacaggcgactacgtctttttcaatgataaaatgcgcgagcaactgcagtcttatttaccggcagggagtcaggcgctgttagcgaccgatgaacaagttgctactagccaagagctaattgtagttgatgaaccagctgatttaactgcttttgaacaattttatcaacaacaacaggccgctaaattaagcttgattttttatgccaaacactctgcttacttagaaggaatgccgacaaaacaacagtttgcgaccttcttagtctacttacgcaagcacccaaacattgaaaaagcgcggttagcagaattagcaacgtatttaaaattacaattaccgttaatgatttttatgttgcaggtgttttttgacctcggatttgttagaatagaacgtggtctgattacggccgagttacaacctgaaaagcatgcactggaaagtgcaccaagttatcaaaaacgattagctaaaattgaaatggaaaaacagcttgtttattcaacctttaccgaggtgaaagactggctagcaactctcccagcagtagcaaatcgctaaaagagttaaggagcgaattatatatgtcaatcaactttaaagattatgtcgcaagtgttccggattttccggaagctggcgttacttttcgtgatatctcacctttgatgtccgatggtgaagcatacgcagcagcaacggataaaattgttgaatacgccaagaataaaggtgttgaaatggtcgttggccctgaagcccggggctttatcgttggctgcccggttgcttacaaattaggtgtcgggtttgcacctgctcgtaagaagggcaagttgccacgcgaaacagtttcagctagctatggtttagaatatggtaaatcaacattatatatgcataaagacgcggttaaaccaggccaaaaagtcttagtaacagatgacttattagcaaccggtggcacaattgccgcaacaatcaaaatggttgaagaactaggtggcatcgttgttgggacagccttcttcatcgaattgaaggacttaaacggccgcgaaaagattaaggactatgatatttttaaattaatggaatactaataaagaagtgcgccatcaacaggttgcttttgaacatttgactgatatagcaaagtgcagaaagtagttgatgaaagcacgttaaagagaaacagacaaaaaaagaagttcgcctaagcgaacttcttttttattacatgcgatctcggtaaaggccaacgacctttcctagaatgctgacttcatttaaaatgattggttcaaacgtatcgttttctggttggagacgatagtgatctgcttctttgaagaaccgtttgcaggttgcttcatcttcggcagtcattgcaatgacaatatcgccattatcggcggttgattgcttgcgaatgataacttcgtcgccatctaagatgccggcgttaatcatactttcaccacgaattgttagcatgaacaaatcttgttcggtttgcaaactaggtggaagcgggaagtaatcagttgcttcttcaactgctaagataggcacaccggcagtaaccacccctaatactgggattttctggggtgtcgccccaattgccgttaggccagcgggcgttaactcgatcgcccggggtttagtgggatccttttgtaataagcccttcttctcaagtcgggctaaatggccatggacagtagaagtggacgataaattaacggcttcgcaaatctcgcggaccgttggtgggtaacctttgtcttgaacacgttcgtgaataaaacgtaagacctctaattgtttggattcagttttagtcataagcgcacctcattcgttctattaagcatatagtagcatatttataggtggatttcaaacaagtgttcgtattttttgacattttgagcattttagtccaaaataggataaaagtttaaatttggaggccgatgatggcaatggatcaaaaacgactcgatcgtattaacgaattagcacataaagcaaaagcagaagggttaacacctgaagaaacaacggagcgtcaagaactacgggacgcttatttgaaggatttccgttctagtttccgttcacaagttgagatgctacaagtttatgataaagaaggtaaggaagtcacacctgaaaaagtgaaggacatccaacatgaaaagggtttacgtgacgattaatctaggaattccgctttctttttagtgcaataatgtgtagaatatttaagtgaactgaatgaggaaggggtgcataagatatgaatattggaataggcgtattaatttttgtcattggggcattattaggtgcagttgctggctttttcggcgcacgtgcttacatgaagaaatatttcgaagaaaatccaccagttaatgaagatatgttgaaagctatgatgatgcaaatggggcaaaaaccatctgaaaagaaattaaaccagatgatgagctcaatgaaagcgcaacaaaaacgtagtaaaaaataaacatgacttaattaaagaggcgtttcgtacaaaaattcttttttgtacggaaccctctttttattggaagggaaataattgtcccactgaactaagattgctataatgaggattatctaattttgaagacggagatattttatgggtatatttaagaaattaggctggtattttaaacaagaatatcgccgctatatattaggggttatttttttagtcctagttgcaattgtacaaattgtgccaccaaaagtgattgggacgttaattgatttaatggctgcccgaaagttgaaggcatcggtcttattaatgtggattggggtcttattagcagccgcgattttacaatatctctttcgctatggttggcggactcgtatctggggtggcgctgccaagttggaacggacattgcggagtcgtttgttctggcattttatgaagatggatacaactttcttccagaaacaccggaccggtgatttgatggcccatgcgaccaatgatttaaccgcgattcaacaagtggcgggcgccggtattttaacgtttgcggattcgattattacaggtgggacaaccatcatcgcgatgattatttttgtcgattggcggctcacaataatggccttggttccgatgccattattagcagtggcttcagggcgcttagggacgcatttgcataccgcttttagagagtcacaagcagccttttcgaaattaaatgataagacgcaagagagtgtttctgggatcaaagttttaaaaacgtttggtcaagaagaagcggatatcgatgatttcgaccaaattgtgacgaagacaattgcgattaacaagcgcgtcaactttatcgatggtttatttgatccagcgattagtttaattattgggctaacgtacctcgttacgattatttatggtggaacattggtcatgaaccacagtattacaattggccaattgattgcttttatcagttatatcgcagccttagtttggccaatgtttgcgattggtcgtttattcaatgtgcttgaacgtggcaatgccagttatgatcgggttgaatcattattaaaagaaaccagcaggattattgaaaagccagatgccattcaaacgttggtaactggtgatatcgactatgccattcaacaatttgcctatcctgaagaacaaacaccaactttaacgaatgtgcatttccaactgccacaaggaaagacactgggaattgtcgggaaggttggttctggtaaaagtactttgatcaagttgctgttacgagaatatgatcaatatcagggccaaattaagattaaccagaacgatattcgggattacacattagatgcattactcgatagtattggctatgttccacaggacaactttttgttttcaacggatgttcgcgataatattcggttcgcggattttgaaaaggaacaagaggccgttgaagcagcggctagttctggtgcggttcatgaagatattttaacgtttgcacagggttacgacacggttgttggtgaacggggtgtttcattatcgggtggccagaaacagcggattgctatttcccgggcaataatgactgatcctgaaattctaattttagatgactcattgtccgcggttgatgcaaagactgaagaagcaattttaatgaaccttaagacgttgcgggcaaatcaaacgacgattattaccgccaatcgactcagcagtgtgatgcacgctgatgagattattgtcatggatgacgggacgattgccgaacgtggcacgcacgacagcttattagctcaacaaggctggtatgctgaaatgtgggttaaacaacaattaaatcaagcgatggggggccaataggatggcacaaaagtatcaatctgaatggtcacaaaagatatcgactaaggaacagtttcaaattatgaaacggctcttcggttataccaagcgctataagaaacaatttatcggcgcaatcatcgcagcggcgggtttagcaacgattaacatcttgttaccgcgcttattacaagtttttatggatcgttacttgacgaagcaaacagcgacaactcagattttattaggggtcgccgggttatacgccttaggggttattttgaaagctatcacgcagttcgctcaatcttttctttttggaatgggatcagaacgcgcgatggaagatgtgcgccgtgatctttttcgtcagttgcatcgtttgggcatgcgttattttgatcaaacacctgctggatcaattgtttcgcgagttaccaatgatacgatgacgttaattgattattggaatgtgtttctatcattattagtgggttcattttcaattatctccgcgttcatcgcgatgtggttgttatcaccgaagattgcattagcaacggctggttttttaccaattttattagtcattatttggtattacagcagttatagtgccaaggtttatcggcatatgcgtgaaaagttgagtcaattgaacactaagttgaatgaatcgattgaagggattacaattattcaacagttccgccaagaaaaacgactcacagctgaattcgaatcggttaacgaagattaccttaaaacaagagaagcgatgattcggactaattccttattgttggcaccggtcgttaatttgctctatacgttggcattagtcgttgttttaagtttatttgggcttacagcgttgcatagttttgttgcggctgggttggtttatgcctttacgacgtacgttagcaactttttcaatccgatgaccaatatgatggattcattatcctcattacaagatgggatggttgccgggcgtcgtatttttagaattctggatcaaacggaatttgcaccagcccaagatgcagatgctgctagtcaaattaccgatggccgcgttgagttcaaacacgtgtcgttttcatatgatggcaagcatgaaattctccatgatatttcgtttgtcgttgaaccaggtcaaacggttgcgctagtggggcataccggttctggtaaaagttcgattatcaacgtcatgatgcgcttttatgaattttatgaaggcgaaattttaattgacggtcaagatattcgcagttttcaaacggcagagttacggcgtaaaatgggcttagttttacaagatgcgttcatgttttacggcgatattgcatctaatatccgcttgtttaacgatgaaattacggatgaacaaattcaagccgctgctgaatttgttcaagcagatgaatttattaaggaattacccggacaataccacgcacgagtgattgaaggtggcgcacaattttcaagtggacaacgacaattactctcatttgctagaacattagtgaccaatccgaagattctggtcttagatgaagcaactgccaacattgataccgaaacggaatcagtgattcaaaccggccttgctcgcttgcgacagggacgaactagtattgcgattgcccatcggttatcaacaattcgcgacgcagaattaattctcgtcttggatcaaggtcaaattgtcgaacggggcaatcacgatagcttggttgcacaaaagggccgctattatgaaatgtatcaattacaaaatggacagagtgggctataagtcggttatatcctgaggattaacagagaggggcgaatgatgactgtaagccatcgtttgacattcggcgttaaccgcaaggaagcacacgtttagattaggttaagcggaagaagcaatttcaacaagcacgtttagtacattttggaataaccaggaggatttttagaagatgaaaaagaaacgctggcttaaatggtctttaataagcgttgttattttaattgtgattggtgtctttggcgcaacgctgtatatgtatcaatatgctttcgtaccagggcaaaagtcattcttgaataatggcaagcctagcaagttttatcgcgacaatcagaaatggttggcaaaagccgataaagtgaagtggtatcaaaagtcagcgactgatgatcttaagctagacgcgatttacgtaccagctgctaagaaaacaactaaaacaatcgttgtggcacacggctatatgggctacaaagaggatatggcgcgctatattcatctctatcatgacttggggtacaacgtattggcacctgatgatcgtggttccggtgaatcggaaggggattatattggctatggttggccagatcgcttagattacgttaaatggatcaaacaagtgattgccaaaaatggtcaagatagccaaattgcactcttcggggttagcatgggcggcgccactgtgatgtacactgctggcgaaaagcttcctaaacaggttaaagcagtgattgaagactgtgggtacagcagtatctcaggtgagttggcctatcaactcaacgatttgtttggtttaccgaagttcccactattttataccactaacttgatggcgcgggtccgtgctgggtataactttagcgaaggagacgcaaccaagagtctcgctaagtcaaaattaccaatcatgttgattcatggcgctaaagataaatttgtaccgacgaagatggtttacgaaaattacaaagccgctaatgcgcctaagcaattgtgggttgtgccagatgcaggtcatggtgaagcgttagccaagcaaccaacagcttatcgcaataaggttgcaaaattcttggatcagtattgggaaaaatagagtactaaaaagacgcacgtcaacgataagtttcatcgttggcgcgcgtctttttttgtgttatttgtgatcgtcaatctcatatttaaaatcaggattgatgtcgtgatcgatttgatcaaaagcggcttgcatttgatcaccaatcattgtcaagttttcgtcgtttaatttaagtttagggtcgactggaattggttcgccgaaacgaatcgtaatctttttacgttttaagacggctgaaaatttcaaggggccttgataaacggcggggactaatggaacccgcgccattttagcaatgaccactgcgccaccttttaattcgcttgaatagcggctaccagtgggaaacatgattaaagataagtcctttgaacgtagggctttaaccggtgttttaatcgctgaggggcctggattttgacgattaacaggaaacgcattggcgtgtttcaagataaaacgtaagattggatttttgaataattcttctttagccataaacgtaaacttacgagggcttgcagcaagtgcgaagaagatgggatcccaccaagtccgatgggggccaactaaaacgtaggtgccctctggtaaagctgatttgttttcaacgttgattcggccgttaagtaaccaggcaagaatccgcacgatgaagcgggcaaatgagaaaaacataattttaattcctttcaaaaaaccttttttaaggcgatttaacgaactacctagctattataccaaataacgctggtctttgttataatatgggctaaatacaagtggggttgaaagtagcatgttaaaagcagatgaaagaattgatcagttattccgattagatattcaaattatccaaagtccatccgtcttttcttattcaatggatgcagtcttgttagctgattttgcgcaattgcccaagcgaggcctgattgttgatttgtgcgctggtaatggggcggtgggcttatttatgagtcctaaaacaaatggtcaaattgtaggagtcgaattacaaccacgcttggcagatatggcacaacgttcaatcgaactaaacgcgttgacggaacagctgagcgttttaaatatggatttaaaagatgtaacgaccgttattaaaaaagatagcgtcgatattgtgacttgtaatccaccgtactttaaggtggcgcctaatagtcaaaagaatcctaatgaacacctagccctagcacgccacgaaattgcgacggatttaagaaccgtggtccaaacgatgagtggtttgttgaagatgaatggtaaagggtatctcgtgcaccgcccagaacgattcttagaaatctgtgatgaattacgggcagcacgcatggagcccaagcgtgtccggttcgtttaccctaaggcaggtaaagaagccagcatggtattgattgaagccgtcaaagatggtaaaaaaggaggcttgcgaatgcttccggaactcacgatctatgatgaaaatagtgactatacaccagaaatgcgcacgaagttattcatggcagaagatgactgagaaagcttattatttttacgtactagtctgtgccgatcgtagtttttatggtggctttacgacggacgtcacgaaacgcgttgccacacataatgctggtaaaggtgcgaagtacacgaagcttcggcgcccggtgcgtttgttgtattacgaaacatttgcggacaagtcatccgctttaaaagccgaatacgcctttaaacaccaaagccgtttaaaaaaggaacggtacttaatcgcacacgggattgaaagtacccaattttaaacgggattacaggttgactctagcgaatatctttagtatacttttaaacggtatttcattaccaaaaaataattcacactggttgatttctagagaggtgcttggcgacaagttctctaaaaaagtgaaaccagtggtcgaataaaaccatatggaggtctgttgacatggctgtattgtcaatgaaacaattattagaagcgggtgttcacttcggtcaccaaacacgtcgttggaacccaaaaatgaagaaatttatctttactgaaagaaatggtatctacatcatcgacttgcaaaagacagttcgcatggttgacgatgcttatgacttcgttaaagaagaagctgctaacgaaggtgtattcttattcgttggtactaagaaacaagcacaagatgcaattgctgaagaatcagtacgtgcaggccaatactttgtaaatcaccgttggttaggtggtacattaactaactgggatacaatccaaaaacgtatcaaacgtcttaaggaaatcaaagcaatggacgaagatggtactttcgaacgtttacctaagaaagaagttgccttgttgaagaaacaacaagaaaaacttgaaaaattcttaggcggtatcgaagacatgccacgcatcccagatgtaatgtttgtcgttgatcctcgtaaagaacggattgctatcaaggaagcacaaaaattaaatatcccagtcgttgctatggttgatactaactcagatccagatgatattgatgttattatcccatcaaacgatgacgctatccgcgctgttcgtttaatcacagctaaaatggctgatgctatcatcgaaggccgtcaaggtgaagatgatgttgaagaagctacatttgctgcagaaaacaaatcagcagactcaatggaagaaatcgttgaagcagttgaaggcaacaacgatactaacactgacgctaaatagtagattcaaataagctgtcttagaggtttcgcaaatactgcctgacttgtgggacagctttttttaaaccaatcatatttaatataaattgtcggaggtacgaattatggctgaaattaaagctgctcaagtaatggaattacgtaagaaaactggcgttggtatcatggacgctaaaaaagccctagttgctagtgatggtaacgttgaagaagcaatcgatgctttacgtgaaaaagggatggcaaaggctgctaagaaaaacgatcggatcgctgctgaaggtttagccggcgttgctattgatggcaatactgctgcaatcgttgaagtgaactcagaaactgacttcgttgcttcaaacgatcaattcaaagctttattgaaagatattgctgaaacaattgctaaaaacaaaccagctgacatggctgctgctgaagaattaccaatgggtgaaggtacaattgctagctcagtaatcaacttaacagctgttatcggcgaaaagatcagcttccgtcgtttcgaattagttgaaaaaaatgatggcgatcacttcggttcatacttacacaatggtggccaaatcgcttcattagttactttagaaggtgctgacgatgaagcagctcatgacgttgctatgcacgtttcagctgttaaccctcaatacgtttctcgcgaagatgttcctgcagaaacattggatcacgaacgtgaagtattaactgaagaaacaaagaacgaaggcaagccagaaaacatcattcctaagatcgttgaaggccgtgttaacaagttcttgtcagaaatcagcttaaacgaccaagcattcatcaaagactcagaccaaactgttgcacaatttgttgcatcaaaaaatggtagtgttaaaggcttcgttcgtttcactgttggtgaaggtatcgagaaaaaagaaaataacttcgttgatgaagttatgggtcaaatcaaataagcatatttgcttcaaaaagggaacgcaatttgcgctccttttttttgcagttttgcgataattcagaatcgcatacccaaatgcctagttaaatatggtaaaatgggcctagtaatcaacggagggatattaaatatgacaaatacaaaatataagcgaattgtcttgaaagtaagtggcgaggcattagctggtgaacaaggcttcgggatcaatcctgaaatcgttaaagtagtcgccaatgaaattaaatcagttcatgatttaggtgttcaaatcgcaatcgtctgtggtggtggtaacatctggcgcggcgtgactggcgaacaaatgggcatggaacgtgcgcaagctgattacatgggtatgatggctactgtcatgaatgctttggcattacaagacaatttggaaagtattggtgtcccaacgcgtgttcaaacatcaattgaaatgcgtcaaatcgctgaaccttacatccgtcggaaggctgtccgtcatttagaaaaaggccgcgtggttatttttgctggtgggacaggtaacccttacttctcaacagatacaacagctgcattacgtgctgctgaaatcgatgctgacgttatcttgatggctaaaaacaacgttgatggtgtttactctgcagatcctaacacagaccctagcgctgttaagttcgatactttaacacacttagatattatcaacaaaggtctaaatgtgatggattcaactgcaagtacgctatcaatggataatgatattccattggtagtcttcaacttgaacgaagcagacaacattaaaaaggttgttgaaggtgccaatattggtacaacgattgaaggagaggaataaaaatggcaaatccaattttagaacaagctaaagaaaacatggaaaaagcagaagcttcattgcgccggacacttggtcaaatccgggccggccgcgctaatgcaagcttagttaaccgtgtcaacgtcgaatattatggcgcaatgacacctcttaatcaaattgctgcaatcacaatccctgaagcacgggtattgttaatcacaccttatgataaaggtgcacttgaagatatcgagaaagctctttacacagctgatatcggtatctcaccagctaacgatggttcagtaatccgtttagtaatccctcaattaacgggtgaacgtcgtaaggaaatcgctaaagaagttggtaaggaagctgaattagctaaagttgttgtccgtaatgctcgtcgtgacgcaatggataacttgaaaaaggctgaaaaagctagcgaaattagtgaagacgaaatgcacgatttggaagaacaagtccaaaacttaacgaacgaagcaacaaagaaaatcgatgctatttctaaagataaagaaaaagaaattactgaaggttaatctaacggtcattaaaaaggcgttgagacaaaatttgtctcaacgccttttttggttaatgaataattttacttttggctgcttctttatggagtttttcgaagaaaggattaatccgatcttttaagaagaggccgatgaagaagaagacaactgcgtaaatcgctagaataatgaaattatgccagagatttggtgcgtagatgcccccggttggttcccgcaataagttaacgccgtaagtaaatggtaataacgggttaatgaattggaagaacttatcggataagacaaccgggaagttcccgcccccaccagagatggagagcacgaggataatcatcgctaaccctttaccgacgttcccaaacatcgcggctaagacgtaaacaatcgtcataaagaccgtgctgaggaagacggctagtagtaagagtgctactggactaacgatataagccttaatcaggaagatattcccaagtgcgacaaagaccgcttgggcgaccccgatgacaatgtaggtcaaccaacgggcgataaattgttgtttcttactgtaacgttctttttgcttgtcgtccaacgagaagttcgtgaggacgatgttactgagcaagagggcaccaacccaaagacaaagggcggtatagaacggcgcactcgctgagccataagttttaattggatagacatgtttctcttgtaacttaaccggttcggctaagaaattactttccttagtagcgtcacggcgaagtagtttgatcaaatctttcaaatcaactgtcttttgttgcttgcgaattgcttccgcacctttttgaatcccacttctcaagaatggccagtcattatgaattaaatcagtggcatcatttaatgctttttcaaggagtgggaatttagcgttggccattgctagtgtggttgttaaatcattttcgataccgggtaaatcgttattgatgaagccggtcgcgagttgcaatttatttttcaacgttgggtaatcgttttgatagagatcagaagcggtgttcaaaccgctgacgatggttcccatattgccatttaagagggtattggcatcgtgaatctcttgttttagcgctggaatttgcttttgatatttttcgaggtaatcgatagcagtttttaatgttttttgcgtatttgttaatagtgatggtaattttggtagcacagcggtgttgatttgatttaaaacagcatcgccttgcgtaatcatcgtttcgaatttagcaaggacgctcttaacgttcgcaccgataccggcattttgaacttggctcacggtattttgaacttgcttagcaaaagcgatgattggggttagttgattttgaatatcagttaaagagagatcatcataatgagcgagcacgttatcaatcttagtttttaattgaccaagatgggttgcagcggcgttgagcttttgaattggatcatctaagagatgtgattcaggcttgccggctgcgactgctgattcattataagcatcttgtaaactttgcaaggtattcgccaattgcgtgttgttagcttgtaacgttgcggtatgggctgataattgctcgaggttggtctttaaggcagcctttaattcttcttgattatcaggatcgtttttagcttgttctaatagtttattaacggcatttaagtcattatcgatatttttcgctaattgatcagtaatcgttaagccttgatcaacagcactttgaatgacaggcaaggtcgttttgagttttggaatcaggtcatttttaacctgactagaaacttgctgcgcggatttaccaaaggtaatgatttctgggaggacggtttgagtcttattaagaacggtcaaaccagttctagcttcggaaataccattggttaaggtattggcaatcccgtcaaaatcactatcaagggttgccacctgtttaccggcactttgaatttctggaatcttcccttggaccttaacagctaaggcacctgcggattcaacttctgggaggtactgattgacgccgacgactttcttagccattttattcgcttcgggtaagaagtttacgaagtcattggcttgtgttaatttagcctgcatctcaggaattttcttttgcagtgcgatgacctgatccgtatattggttaatctccggaatctgttggtctgttttgagaatcatacttgagaaacggttaatgacgggcaaattttcatcgagtttaaagccagccttattgagagaggacatgagggttttagcaaccgtctggacaagttcctctgaaatggttgattgaagcgttgtcgcgcccgcactagtaattttaggggcaatggcgttaatcttgtcattggatgaataaataatcgttggtttttgaattttaccgtcgacaaagctaattaagtccttagaaaagttcttgggaacgtaaataccggcataatatttaccagttttaacgccttcgtccaattgctttttactgcttgtaaactgccaaccaagtttatcgttctttttcaattggtcgattaattcatcaccaattgcgactttctttttagcgacagtcacgctttgatctgctgaataaacagcgacttttaaatcttgcgtcttactgtaaggatcccacaaagcccagatattaaaccatgcgtagagggatgggatgataattagggcgagaattagtaagaatgcgattgggcttttgagaatccgccgccaatccaagcggaagagttcgaatgtctttttcatagaggactcctttgaaaataaaagttatttagttagtttagcacatttaataggatacttggagcttatcatgatgatttgaaaaaatatttaatattattttaaatagtcactcccagcaatttttggtacaatcagtgttgagtaactaaactggaggagtcattttgtttacaaataaaaaagaaacagcaaaaattcaacttgatccggaaaatatccccaaccatattgccattattatggatggtaacggtcgctgggctaacaaacggctaatgccgagagttgctggccataaagcagggatggaaaatgtgaagacaattaccaaagccgctagtcggatgggtgttaaggttctcacgttatacgctttttcaacagaaaattggaagcgtcctagtgatgaagttaattttttgatgcaattgcccgtcgatttcttcggcacgttcatgccagaattaattgaagaaaacgtgcgtgtgaaagtcatgggtaacatccatgacttacctgaaaaaacgcaaaaagcagcgcaagatgcgatggctgatacggcgcaaaatacagggatgattttaaacttcgcattgaactacggtggtcgcgatgaaattcaacaggctgtccaacagattgccaaagatgccgtaagtggtacaattgaggctgattcgattgatgatgacttgattagtcaatatttgatgactggcttcttaggggagtatgcggatcctgaattattgatccggaccagtggggaagaacgcatctcgaactttttactttggcaaatcgcttatagtgaattagtcttcgttgatgaattctggccagattttacaccgcaagtttttgaaaaatcaatttttacttatcaacaacgtcaccggcgctttggcggcttaaaatagacgtttatttattaggaggcagttcagtttatgaaacaacgagtgattacagcggtcgttgcgttgattatctttatcccaattttaattagtgggggcattttcattgatatcgccgcagccgtattagcattagtcgcattatcagaagtctttattatgcgcaaacggattatcgtttcatcagatgccatggtggccggtttagccgtattaagtttggcattaccagcgggagcgtttgactggttgccagatggtgtttcacaatttgatttgttctatctattcgtcgcaatcttattagccatcacggtcttcacgaagaaccgtgtaaacttcgatgatatgggtgtcacaactttagccagcctgtatattggacttggcttccactacttagccggtgctcgtaatttgggcggtttcgatacagtgatgtacatcttattggttatctggatgacagatattggtgcttatatgtttggtcgtgcatttggtaagaataaattgtggccagcaattagccctaataaaacatgggaaggctcaattggcgggactttactagccgttgccgttgcagcagtttacttatacttcttcccacaaatttactcattgccaatcatgttaggcttaaccttaatcttctcaatctgtggtcaattaggggacttggttgaatcagcttacaaacgctattatggcgttaaagattcaggtaaaatcctaccaggtcacggcggcatcttagatcgctttgatagtatgttgtttgtactaccgttactacatttgtttggcatcatttagcatgaatgacctgtttttaaagctatcattcaaatcagagtgtttttccatccgttcattatcactaactcgatcctctgcgatcaagctgtgaaaaggggcgcatgcaaaagcactcttttttcttttcatttcgtgatataataagacagttccctataaaatcagaatctgaatgacggtattgaaaaaggaggtcggatacattggctgcaattattgcgtttatcatcatctttggtattttagtagtcgttcatgaatttgggcatttttacatggctaagcgctcaggcattttggtgcgtgagttttctgtcggcatggggcctaaattatttgcaactcgcaaaaacggcacaacttacaccatccggtggttaccattaggtggttacgttcgaatggcgggaatggccgacgatgaatctgaaattgaagcgggcacacaagcgactttaattttggacgaacaaggacgcgttcaacagattaatacaagtgacaaggtcaccacgttaaacggggtgcctttccaaattgctaaaacagatttacaaaaggaattgtgggtcgaaggttacgaaggcggcgacgagtcagaaatgaaacgttatcccgtcttacatgatgcgacgattatcgaagcagatggaacggaagtgcaaatcgcacccgtggatgtccaattccaatcagcaacgttgattaatcggatgttaacgaactttgccggaccatttaataacttcatcctcgcaattctagcctttatcctcttcgcttttctaagcgggggtgtgccacagcaatccaatcaaattggcacggtacaagagaattcagctgctcaaaaggcaggcttaaaagccaacgatcgtcttttgaaggttgataacaaaaaagtagcgagcttcactgactttagtgcgataatttcagaacaccctaacgaaactgttgcggtgcgcgttcaacggggcgcaactgaaaagacaattaaggtgactcccaaggctgtcaaagtggctaaccaaaaagaaaaggttggtcaagtaggggtcacacaaaaagtcaaaatggatcatagcctaaaggccaagatttcttacggctttacacaagcttggtcaattgccagtcagattttcaagatcctcgggtcatttttaaccggtggattctcactagataaattatcggggccggtcggcatgtattcaatgacgacccaatttacccaacaaggctttaatgcgttagtttatttcttagcgttcttatcacttaatttggggattatgaatctaattccgattccggcgttagatggtggtaagttagtcttgaacattattgaagcgattcgtcgcaaaccaatttcacctgaaaaagaaggcatcgtgacattaatcggtgtcggtattatggtgttattaatggtcttagtcacgtggaatgatatacaacgatttttcttttagaatatttttggaggcgtaacaatttatgaaacaatcaaaattatttatcccaaccctcaaggaagtgcctaattcggctgaagctaaaagtcaccgaatgatgcttcgtgcgggttacattcaccaagtctcagctggtgtttatagctacttacctttggcttatcgcgtattggaaaatatccaagcgattatcaaggatgaaatgagcaagatcgacgcagtacaaatgcaaatgcctggtattttaccagctgaattatgggaagaatcaggtcgttatgcaacttatggccctaacttattcaaattcaaagatcgtcattcacgagactttatcctcggaccaacacatgaagaaacatttgctgatttagtgcgcaataacattaaatcatacaagaagttaccattaacgttatatcaaatccaaacgaagtaccgtgacgaagatcgtccccgttatggtttactccgtggccgtgaattcatcatgcaagatgcttattcattttctgctaatgaagcagatttggatacaactttccaacaaatgcgccaagcttacacgaacatttttgaacgttgcggtttagatttccgcgcaatcgttggggatgccggcgccatgggtggtaaggattcaatggaattttctgcgattgctgaaatcggggaagatacgattgtttactctgatcaaagtgactacgctgctaacttagaaatggcaacgggggttcgtcctggtcaaagttcaactgacgtccaattagaaatggaaaaagtggcaactggcgatgcacattctatcgaagaagtagcagcacgcttagaagtacccgctcaaaagattattaagagtgtgcttttcattgctgatgaaaaaccagtcttagtgcttgtacgcggtgactatgaagtcaacgatgttaagttgaagaacttcttagatgctgacttcttagaccttgcaactgctgaacaagttcaagcaacgatgaacgccccaatgggttcaatcggacctgtcaatgcaccagaagatgttcaaatcgttgctgattacagtgttgaagcacttgttaacgccgtagtaggtgctaacgaagctgatcatcacttcttgaacgtcaacagcaagcgcgatttcaatgtcgcagactatgctgacttacgttttgttcaagaaggcgaaacagccccagacggtgaaggtaaattacaattcactaaagggatcgaaattggtcatatcttcaaattaggaacacgttacactgaacaattcggtgcaacattcttagacgaaaacgggcgtgctaaaccaatcatcatgggttcatacgggattggtgttagtcgtctattatcagcaatcacagaacaacaagcagatgagaatggtttggtttggccaagtaccattgccccatacgacttacacgttgttccagtaaacgttaaggatgatgcacaagttgaattggctgaacaaatcgaaggcttgttagaagaagctggttattcagtcttagtcgatgatcgtaaagaacgcgctggcgttaagtttgccgatagcgatttgattgggttaccaatccgaatcacagttggtaagaaagctgccgaagaaatcgtcgaagttaaattacgtaaaacaggcgaaacattagaagtgaagaaggatgaattaatcaactccctcagcattttgttagcctcagaaaaataaagatgaactgacattagtcgagcctgggatgaaacttgcttttgtctcagactcgttttttgtcactgagtaaggtttaaaaagggtcaaaagtagcaagattgcacgtttataggcaatcgttacttttcggcctctttttaattcaacgtatcactagaaggaggcccttttgtggcattagatcaaaccgcattgtttcaaaaattattagaacagattgctttacctgcggatgtcgcgcactatcccggctttaaaacggggcaggtcgaacaagtgattgtccacgaaacgtcaaaacggtggacctttaaattacacttcgataacgtgttaccctttgcggtttacacagcgtttgaagaacatttagaagcgacttttcaagcgattgcggccgtttcaattgaaatcagtaccgattctaaagaacttgatggtggtgttttagccgcttattgggaatatgtcgtcaatcatagtgggattcaatcgtcactcttgcatgaattatgtgccaaggagacgccctatattgaaggccgcaaagtcttattggttgttgaaaatgacattgttaaaacctttttcatcaatcaagcgcaaacgacgattcaagccggttataaacgcctaggcttccccaactttgcgattcaaccattaatcgatgaatcagcttctcaaaaatcaatcgaagatttccaagcaaaacgggcagtgcaagatgctgaacgtgcgcaagcagctgccgaagcaatcaagaaaaacgaagcgctcaaagaaaaacgcaaaacagaaggcaaaccagttgatggcccaatcgtgatgggtcgcgggattaatccagctgaaccagttcgtcagatgattagtatcactgaagaggaacgttcaatcgtgattgaaggctttatctttgataaagaagtccgggtactccgttctggccgccaattattaatcttgaagatgactgattactcatcctcatttacggtcaagaagttctcaagagatgctagcgatgaaagtttattcgccgcaattgataaaggcatgtggtttaaggttcgcgggagtgtccaagaagataacttcatgcgcgatttaacagttaacgccaacgatttagttgaagttagtcatcctaaacgtgaagatacagcgactgaaggtaagcgaatcgaaatgcatttgcataccaacatgtctcaaatggacgcgaccaacccaatcggcgattacgtcaaacaagccgctaagtggggccaacctgcgattgccgtgaccgatcactataatctccaagcctttccggatgcttatgccgctgggaagaaaaacggcgttaagattttatacggcgtcgaagtcaacctggtcaacgatggcacgccagtcgtttataacttgcgcgaccaagtcctagaatcagccgaatatgtaatttttgatgtggaaacgactggtttgtcagccgtttacgattcaattatcgaattggctgcggtcaaaatgcgcgatggtgaagtcgtcgcctcgttcgatgaatttatcgacccagagcgaccactatcagccttcacaacgcaattgaccagcatcaccaacgaaatggttcacggtgccaagaaggaagctgaagtcttggcaatgttcaaggaatttactggcgatgccgttttagccggtcataacgttagtttcgatatgggcttcttgaacgcgggttatgaacggaacgatattgacctgatcgataacccagtcattgataccttggaattatcgcggatgttgcatcctgaatacaagaatcataagttggattcattgaccaagcgctacaagatcaacctagaacaccatcatcgagctaatgccgatgctgaatcaactggttatttattgtataagttggaaaaagaagccgctgaaaattacgatatggtgaacgtcaatcaattaaatgatcgcgtcggggtcggtgagttttacaaacaagcccgcccagcacatgcggtcttaatggcgcaaacccaagctggtttgaagaatttattcaaattggtttcagcctcaatgaccgaatactattaccggacaccgcgcttgcctaagagtaaactcgatgccttacgcgaagggattttagtcggttccgcctgcagtaatggtgaagtctttgaagcgatgatgcaaaaagggtataacgaagcgctcgatcgtgctaaatactacgattacatcgaagtgatgcccaaagcggtttacgcgccattattggaacgtgaattggtgcgcgacaatcaggcgcttgaagaaatcattcgcaacttagttaaagttggcgaaaaactcaacaaaccagttgtcgcagcgggcgacgcacattatttgaatccagaagacgcgatttatcggaagattctgattcactcaatgggcggggctaatcccttgaaccgttcgaagttaccagatgttcatttccgctcaacggatgaaatgttgacggcgtttgacttcctgggaccagaattagcgcaagaattagttgtggccaatccgcaaaagattgccgatcaagtcgacgaaattgtgccggttaaagataaactctacacgcctaagatggccggtgccgaagacgaaattcaaaccttaacgatgaatcgtgcgcacgaattgtacggtgctgagttacctgaaatcgtcgaagcccgcttgaaaaaagaattgaagagtattatcgggaatgggttctccgttatttacctgatttcccaaaaattagtttataagagtggcaaggatgggtacttggttggttctcggggctctgtcggttcgagtttagtcgcaaccatgaccgggatcaccgaagttaacccgttaccaccgcattatcggtgttctaactgtcactactccgaattctttaccaaaggggaagttggttcgggttacgatttagcggacaaagattgccctgaatgtggcacgccacttgataaggacggccatgatattccgttcgaaactttccttggcttccatggggataaggtgccggatattgatttgaacttctccggtgattatcaaccagtcgcccataactatacgaaggtcttgttcggtgaaaataacgtgttccgggccgggacaatcgggacggtcgctgataaaacggcgtacggttatgttaaagcctatgaacgtgatacggaacaaactttccgcggtgctgaagtcgatcggttggcaaaagggtcaaccggtgttaaacggacgaccggccaacatccagctgggattatcgttgtgcctgattacatggatatctatgatttcacaccaatccaattcccagctgatgatcaagatgccgcttggaagaccacccattttgatttccattcgatccatgataatatcttgaagctcgatatcctgggtcatgatgatcccacgatgattcggatgctgcaagacctctctgggattgatcctaaatcaatccccactgatgatccgggtgtgatggccttgttctccggcactgattcactcggcgtgacgcctgaacagattaattcgaagatgggcaccttgggtgtgccagaattcggaacgcgatttgttcgcggaatgttggaagaaacacatccaacaaccttctcagaactactccaaatttctggcctttctcatgggaccgatgtgtggttggggaatgccgaagaattgattaataaaggcgttgtcaccctgaaagacgttatcggttgtcgtgataatatcatgatggatttaattcactggggaatggacgatagtatgtcgttcaacattatggaacgcgttcgtaaaggcaaagggattccggatgattggcaacaagccatgcgcgataatgaaaacgtgccggattggtatatcgattcttgtctcaagattaaatatatgttcccgaaagcccatgcgaccgcctatattttgatggcgcttcggattgcctatttcaaagtgtacttcccaattatttattactgtgcttacttcagtgtgcgggccagtgacttcgatctcgtggcgatggcccaaggtaaagaaggcgtcaaggcgcgcatgaaggaaatcacggataaagggatggaagccagcacgaaagaaaagaacttgttaaccgtgcttgaaatcgccaatgaatgtttggaacgcggtatcacgattaagatggtcgacatcgaaaaatcagattcatctgatttcttgatccaagacgaccataccttactcgcaccattccgcgccgtcccaagtctaggcgataacgttgctaagcaaatcgtctccgcccgcgaagaaaaacctttcttatctaaggaagacttatctaaccgtgggaaagtttccaagacactgatcgaatatctaacagaaaacaatgtcttgaatgatttacccgatgaaaatcaattatcgttgtttgatatgatgtaaattaaaaagcccacctagattgcagactgcagtttaggtgggctattttaatggtatagtaaatactaaatgatagaaaagtgaggactaaaatatgacagaaaccagtatggaaaagattaatcaatttagaaatgcaagaaattggcgaccagcccataatgaaaaagatctagccctatccatttcattggaagcttctgaattattggaactattccaatggaagacagctgaagaaggcgttcaagatattgaacggataaaagaagaattagctgatgtgttaatttatagctatacgatggctgataatttaaacctcgatattgatgatattattgctaagaaattggtgaaaaatgcggagaaatacccagcacctaaggaatagaaacaaaataatatataaatcctcaatggagctagaaaaattctagttccgttgaggattttgtatttctaatagaaagttagttttatccgaggaataaatagatttagcgaaccctcaatttataaactgattaatcgtatcctatgctataattaagccaatgtaaaagcatgtataaatggaattcttggagaagaaaaataatttatgccaatcgttaaaagtcgacattggtgatatttgtgaagtcgtgcttaggcacaattaattctgagaggagcatgatcatggacgataaaaactacagtgcgagcctcgtttcgaggcggttctggttttacgaatctaagcaatacatagaaatgcttaatgatggaatgactagtgatgaaattcaaaagcttagtgaaaatgaaaatatttttggtgcagcaagtaacagtcgtgcgaaagaaatattcaatacagtacgccgacgcgttaatattttagatgaagaaattcaagccatatttcctaaacttaacattgataatcaaaaaattataatctttatttcagttttattgctgaacgatctaatacttgaatttatgctagaggtttatcaagtgcagttgcaaaagggacaaatgcagctaacggtgacggattataaagctttcttctctgaaaaacaacgaactaacgaaactgtggcaagttggaagccgtatacttataatcgtttaggcagtgcatataagaagtacttgctagaggcggggttgatccgagaagatggtgaggcagatttaatgacgttaaaggtaatcgatcccaaggttttgcagtggctaagagtgattggtcggccggatattataagagccattacagggggattgcaataaatggataagaatattgaagatcgatttaaagtattagaacagactttaaactcggatgactttttgaaaagccgtggcctcggtaacgaggtaggctattatatttttgattacaatcctagagatgaattagttgttcgagaatatgttagaaatttaaaaaatcagaacgctccagaaacgaatggctataccctacaagtattcaacttatatgagattatgatggagtttattgagcaaaaaggctatctatcaaaaatcgttcaaatggaacaaaaacacggcatcaaatttgtcgcaagtcgaattaatcgattgctgaagatggaagagtttgatgacgcgcagatgtactttacagagtatatcggagaacgtgtagtagatgatgccgtcgtgattcttaccggtattggtgaaatctaccccattataagagctcattcggtgttgaataagatgcatttggtctatactaagcggccagttattatgatgtatccgggggaatatgatcgtttaagactaactattttagatactaatcgggatgctaattattatcgagcattcagaatcaactaggagaagataaaaatgaaaattaatgatatgtttttaaaagatattcatcgcaatattgaaggtgttattactgcaacacaagcatctgatgaacaagtttaccaggagttagacgagtatgttgtcactaaggaattacaggggcattttaagaccttctttgatgcttacaaaaaagggattattggtgatacaagttcaatgggtgtttggattcaagggttcttcggttctggtaagtcacactttttaaaaatactatcgtatatccttgaaaataaagagatcaatggtaagacagcctttgatttctttactgaaggggacgaaacggctcgtaagattaaagatgacatgacgatcgctgatatgaaactagcagctgatacgccaactaatgtcatcttatttaacgttgagtcgaagcatgctgctggaattgaagagaagagtagtttagtaaatgtctttttaaaagtattcaataacagtattgggtattcaactattccacaactagccgatttagaacgggcattagataagaaagacaagtttactgaatttaaggcagcctttgaagctattcaaggtgaaagctgggagaaagcgcgtaatgaagtcgatttcctagaagatgaggttgttgacgcgcttgttaaaattgactacttttcagaatcggcggcacgtaactggtttgctaagtatgacaaagaatatcaaatcagtattgaagattttgcggttctagttgaagaatacttacaggcaaaaggtaataatgaacacattgtttttcttgttgatgaaattgggcaatacattggtggtaacagctcactaacgttacaattacagaccatcgttgaagaattaggtaacaaaacgcgtgggaaggcctggatcattgtaactagtcaacaagcaattgataagatcacagatattgctggttcagctgcactcgatttttctaaaatcaaagggcgctttgaaacaacactttcattatcatctgcaaatgcggatgaagttattcaaaagcgaattctagctaaaaataatggggctcaagatttcttagaagcggactatccaaatcatgagaatgatattgactcaatgttggtttttgaagatagcccagagctacgtttatataatagtgcgcaaaactacgcagatgtttatccatttgttccttaccaatttaatctattggcgaacatcttaacgcaaatctctaagcattcgattcagggtgctaatttatcgcgtggtgaacgttccttactagcttttttcaaggaaacagcagaacgaaatgcggataaggaaagtgatgcgttggtttctttagatcaattctatccttccttagaaaaatggttgaatgaaactgacaatgctaaagtgatcaaacaagctgaagaaaattcgcgaattgtaccagatcctgatgatcaatttaatattgcagttctgaaagtattgttcatgattaaatatgtggatcaaaatattaaacctacgttgaataatattactaatttattaattcgttcagtgaatgaagataagctagctttacgtaaacaagtcgaaatggcacttaaaattttgattagtgaaaatttaattcgacaaaatcttaaaagcttcgtcttccagacggatgaagaacaagaagtgacacggttaattaataatatcgatctaaatgaaacagatgtcgataacaaattagcagttgatatttttgatgcgaatgttggtcggaacagtttttcttataagaatattcatgccagcggacgtgcttttgataaccggtacaacttcagttataacttgtatgttgatgactatgcttatcggaagaacagtaaccccaacctagaagttaaagtgattacaccagactatgatggattatggaatgatgaagcacaattagttattcaaagtactaagaatcaaatgttaattaacttaccggttgatgcggaattcatgaatcatattaaaacgtacttgcgagttgaaaagtatattacaacagcgaatgtatcgagcgctatcaagaattttgctgctgtgaaagctgagaagacaactgagaatcaagatttaggggattcaatcaatcaacaattagtggactttctgaaacaagcgacattctattttaataacagtcaactcgatgtttcaggcggggactttaagacccgcttgaatgatgcgctacagcaaatggcgaagttggtttatcataaaaatgacttagtcgatgctgctatatccgaagccgatattaataactacctaaaagaaggcgctgatagtttagtcgctcataatgagaatcagaatttaatcgatgaagtgaaacgttatttacaattgcaagaaagcaagaaattaacaacgacaatgcgaacgttgcgtgataattttgttaacaaagaaccatatggcttagttaacgaagatattgagtgggcgattgcgcgattgtttaaagaaggcgatattaatttatttaaaaacgcgattccattatcgacgacacaagatttaacagaaatttcaaaagttattttcgaacgtaaagcgcctgaaaagatccgtgttgagttacgaattagatctaatctgcaacagaaaaaaatggtaaaagaacttggtgatgcgctatttgaaagtcggaacattgttgatgagaatagtgacgatagaacaagagctaaatttattgagcgtgcagagcgattgaaagacgagtttaaagcctatcgagatacgccaggtaggaattaccctcaagcagaaatcgtaactgaggtaattaaagtaatggaacgtgtggttgatgccagagatacacaatcattctttgaagtacttaagaacaaggaagatgatcttctagatttagcggaagatattaacgatattcgtaacttccataaaagtaagcaaaaggcaatttgggataaatcacgtgattacatcagtcgaattcaagataatactgttaaagaatcaacagcagagattgatgaaattattactgaaatgacaagcatcatgaagcaagtggtaccttatagagaattacctaaactagggaatttaaatgagcagttcgagagtaagtatcttgaatttattgaaattaaatcaaaatccgctgccgaaaaagttaataatgataaagaagagacattagccgatttggatagtcgtgatttagatgatcgctttaaagtcaaagtgattagtcggtttgatcaattactcaatgaactagaaagctatcaaaaattagacccaatagagttaataccagtccgctcagcagctgaaaagcgttcatgtattagtcagttcacagcggaagaaaatcgcatacggcaagagaaagccaaggcaactatcgaagtgagtgctcaaccgaccgttggagaaaaagatgcatcttatactgcagagaaacctgaagagaaatcagttaaagtaattgaatctgttcagctagattcactggttgattcaagaacacgggttaaaacacctgaagacattgatacttatgtcaacaaaataaaacaagaattactaaacaaactaaatgatggcaatgaaatagatattctattgtaatcgaatggagtcaccaaatggataagaaattaataaagacctttgcaattgaggcacgggtaaagttacgtgaaagcgtgatgagtaaacttgcaaacttgggtattactgatgaaaaaacaagtgaaattaccgaaattggtaatgatacaatcataattaatgataacaatgaacgactcactgggaacgacgtaaaaaaccgcgctaaacttatagaggaattaaataagcgaggatatcagactgaaaaacataaaattgcgtatgatacattggttgaggaagttgcttatacatggtttaatcgcctgattgcgatccgttttatggaagttaatgactacttaccagagcgagaaagagtcctttcaagtgaatctgggattaaacaaccagacatcattacgcatttactagatacagaaatgtatgctgaatttgatttggccacaaaagaacgtgtaacagaactattatctgatagttctgcagatgcagttgacgagttgtatcaattggtctttatcaaacaatgtaatagcttgaaccaacaactaccggatttatttgaaaagattaatgattataccgaactattatttacagtctcttacattgatgataatggtgttatcgcatcattattaaatatcccagaagatgcctttaatgttgatgagggtggtcaagttgaaattatcggttggatgtatcaatactataatacagaaccgaaggataaagtatttgcacgcggtagtcgaaaaattcgagcagatgaaattccagctgcaacacagttatttacgccagattggattgttcgctacatggttgaaaactctctagggcgttactatatcgatcaaaagctggctaatcctaatgaaacacgaactgaaaaagaaattgcggatgaatttggttggcaatattatttaccaactgcagaacaaccagaggatgtgcagttacaaattcaggatgaacgaaaagctaaaagtgatttcgctttacaagagttaaaactgattgatccttcaatgggcagcgggcatattctagtttatgcttttgatgtttttatgcagctctatgaagcagaaggacagtcaccacgaactgcgtcggaattaattcttgaaaataatctattcgggttagatatcgatcaacgcgccttccaactcgcctatttcgccttgatgatgaaaggtcgccagtattcacgacgtattctatctaagcagcttcggccgaatgtatacgtggtgcctaataattcagatattggtgaagccgaattacaattggttcaaatgcaattcaacgatcaaaaaaaagcccaacaagacttattaacacttgctgaaggctttaaaactggtgctgaattaggctctttaattaagtttgaaggtctagattttgaaaacctgaaatccggattaaataacacaaatgtttctttctttgaccaatcgattaaagaaatgattcttgtgggcgaactcttgcagcaacaatacgaaatcgggattaccaatccaccgtatatgggttcttctgggatggataaaattttatcaggatatgtaaagaaaatataccccgatagtaagagcgatttatttggtgtctttgttgagcgtcttgaagaaatggtaaaatctacaggatattatgcaatgatcacccaacacgcttggatgttcttatcaagttttgaaaaattacgaattaaaattaatcaacagaccattatcaacatggctcatttagggacacgggcttttgaggaaattggtggagaagttgtccaaacaacatcatttgtaataacgcctaaaaaatataagaactatgccggtggatatttaagacttgttgattttgacaattataggttaaaagaaacaaaagctttggatgcaattactggttcaacagattatctatacacaattaaacaagatcgtttcttggaaatacctggacagccaatttcgtattgggtaagtgaaaatctaacatcagattttgttaagggcgaaagaatggatcaagtagtacatcctcgagttggttttcaaaccggaaataatacaaaatttttacgacaatggtttgaaatagaattcaaaacaattaattttaacatctatagtctagatgatgcttccaaaatgattgagaaatggattccatataataaaggtggatcgtatcgaaaatggtacggtaatgaagattatgttattaattggggcaataacgctagtgatttaaaaaaagacttaaagtctggtaaaaatgttttattcagaaatatggatggatattttaaggaagttattacttattcagatattacatctggttcttttagcgctcgatataaaactcaaggaagcataaatgatgcaaaaggacatattgcttacggtgcaagggaggatttactattcattcttggggaaattaattcacgtgtaggaaattatatctttaaattaataaatccaactatgagtttacagatcggaaatttccagtcttttccaatacttccgggtcctcgtaaaatatccaatgatctcgttaaaaaaaatattaatatagtagaagaagattggaatagctcagaaacttcgtggaactttaagaaaaaccaactagtttaaactatctctccaattaatgggtgctgactaaaatcattagttgtttcaaatgacgtatattctttttttgacaataaaatattttgtttaactatgttttctacattaatatataatagtggaagtttttgaatagtcccaaatctatagtcaagggttggcgaaacataacttaataatttctgaaataagtttgtattcatataaccaataatgttatataaattgtacttttcactaaaaaacatagttcctttactatcaaaagcagcgtttgaaaccgattttcgaactgaaaaatttccagaggtaagtgccgaaaaagtggccccatcgctcctttgaaatgatttattacgaaaacttgatccgggataatttttaattacgttcccatcatcataccagttaacaagatagtcattattaccaaaccacttacgatagctccctcccttgttgtaaggaatccagttcttatttaatgcatcaatttcaaaccaatagcggagaaataaggaattgtttgctgtagtaatgccttctttaaaatttaccttatctacaaatgatggcatagtaaaaagtttcagtatgttttcacttacccaaaaagaaattggagatcccggaatatttattaatttattttgatttgttcgataaaaataatcaacattattacattgaattgcttttaaaactttttctttctgtacagtcattccacctttaaaatcagacagcttcagataattccccactggttcagttctagcattctttatcataaaacaacaaaccggaacagtagcttcttcaaatgctgaatattccatctgtataaggcttgagatactcttattagtaatcaagaatgatcttaattcttcatacgatttaataaacatccaaacaaatggtgtcataaagccggcataaccgccatcggtcaatatgttactattcattttaataaatactgagaaaagatctgttttgacatctggataattctttttaacatatttatctaaattagaactcatcttatttaaatatggcggatttgttgtcactgctgtgtatttggtcatcagtactcttgtaatattaagaatactgatgacctttgtttgtatttcaggcaactgatagagaacatccatatctgagaaaattttaaatgatccgataaactgttcaagctgatctagctctgattgtcgaagttcttcaatctttagaatagagccaatttctgttgcatttttaaattgatctagaagtctagtaagttgatttaatagagttgttgttaattcataagagtatggggatacttcggctaatcgttcgaagtactcatttggtatctcgggcgaatcaataaactgatgtaaatttagttttatgtctttagataagattcgtcgattgtattctcgccccttcatcatgatggcaaaatatgctagttggtaggcccgtttgtcaatttccaaaccaaataggttgttagtcataatcaattcagctgcatcacgttctctaaatccttcagctgtatagagctgcatgaagacatcgaaggcataagccaaaacatgtcccgatcccatagcattgtctaaaagttttaactcttgtaaagcgaaactagtcagctaatgctgtattcatgattttcataatcagttttgtttcgcgttcttccatttccttaataacgtggaggtagacgctttgtgttgtggtgacatctttatggccaagtcggcgactaacactgagaatgttgacacctttgaatagcaggattgaggcgtgtgtatgccgtaatccatgaaatgaaattggtggaatattgagttgatagcataggttctcgaggtagcgattaatcgtggcactaacgggtaacttcccgtgtagatcactacaaattctgtcatgatttttaaaacggtgctggcgaataatctgtttaatgatacccaacgtgcttttatcaacgtcgacggtccgcactgagcttgcattcttcgttgttttaaaaccggtatggtatttatagtcccaagttttattgactgagattagtttatgcttaaagtcgatatcgtccactgtaagaccgagaacttctgcatagcgtagaccagtcatcgcagacaaatagacaataaaggcatgtgaatcagatgggtggctgccggtatagtgaatgagttcttgccaatccgagtaagaatgaaacatcacctttgctttcttcttctcgcgaccagtgacaatcgctttacgtgtaaagtcggtattaatcgtgccttcttcgagaatatcaagaacggccgcgcggatttgcttatgaaatccagcggtcgttctttttgcatgggttctagcaaattgattaagcgcttgttgataagtttgacgatcaagttgatcaagatttgttgcgccaaagtaggtgagaatgtgtttatgggtattttcatattttatataagtaactggtgagattgctggctttttgaaagtttccatccattccttaaagtaagcggcaagcgtaatttctctgttcataataattcttcctttcatatttgggattaatatgattttagcgaagaatcgatactaagcgtagggtgcaaatcataaaaaaagacggtataatattgactagacggatactggaggagttagttcatggcaacgttaattaaagataaatttgatgcttgggaaaaagaagcacaagcgcgttttgaccaattgaaatcaaatgaagaagaactaaataaaatttttatcgatctctatgggttacaagatgagcttgactatcatgttaaggatgacgaaatatcggtgtcgcttgcagataaggaacgagacattaaatccttgattagctatgcagtaggttgtatgtttggccgttattcacttgatgaagagggattagtatttgctggtggtgaattcgatctttcacgctacaagaaatttaagccagatgctgataatattctattactaactgatgatgaatattctcaagatgatgaaagtgatattgtcattaaatttgttaaattcattgcgactgtttacggacaagaaacacttgaagaaaatctagattatattgcggatgttttacctggtagtggtaagagtcgcgataaaattcggaagtattttgtctcgaagttctataccgatcatcttaaaacttataagaaacgaccgatttattggcaatttgattcaggtaaagcgaacggcgctaaagcactaatgtatctacatcgttatgatgccgatttattggggcatttacgaactgattatattactaaattaaagcaagcctatcattctcgaattgaattacgcgaaagtcaaaaattagcagcatctaatgcggctgaaataacgcggtatgaaaaagaaatgacgaagattaacaagcaattaaaagaattaaatgtgtttgatgaaaaaatcggccatttagctttaaagaaaattgagctggatttagatgacggtgtaattgttaactatgataagctacaacgtgatcctgatactggtgagaaatatgttattttatcaaaaggggttaaagaaccctaaggagtagtgagtatatgtcagatctaaatctgaatcaaattcaaactcgcttgaatgagcttttcgtgacttacggggaacgtaagctcattttttggtttgatcctaagaaggaatttgaagaagacattgataatggacaaattgtattaaatggtgcgcagatttataaactggcaccagacaatcaatttgaaacaaaacatttttttgaattggaagacaaagacaacagttacttaatttatgcgccttttgaacgaatgagtgatgatgacgaaaataactttttactaagtctactaaaatactcggggacttttaatgctgatcgaatctcattgattatgacacagcttaacattccagcagaactacatgctgttatggaaacatatgcaaaattctttggcgccaagagccgagttgcatcttttgaaaagatgatgaccggtgaaatcaaatccagagaagagcttgaaatgacgctaatggcggtgttaacaagagccaacactgcacagttttatagtgtcattcaagcgctatttgttgaatactcagcagatttaagtgattcatatgaccagttggtccggtttgatttagcacctgcgttttggcaatatgtggcccattattatggctatacaacgacagaaccaacgattcaaagtttagtgattgctttttttgcaaatacttattttggacaattgggttatcaagaattacccataggtttaaaagattatgaagtattagatcaaacaatggcaatcgtttcatttatggacggtgtgatgaatgattctcgttattcggagccaattgatcgtctaagtgcagatatttatcgattaattaatggtggtaagttacttgataaagcgccaattgaagaattaattgatgctgatgtttttgaagcaattcattcaaagattattgaatattatattgctcaacttacaaatgatgatttgacaccgctgattaatgggatgtcattggaagagattgtggttcgaaaacaaagagcacattttggattccgttatgaacatcaataccaagcaattttaaatgctcaaaagttattgaatagtgtgacaatctttaacatgaatcgctttagtgacctagtgaaggactacgaagatgaattatatctaattgatcaatactatcgaaaatttacattacatttagatcagattgatgaacacgcaaactttgcatcattacaaaatgttgttgaaaaacattataagcagttcttagatgaaattggtcgaacttggaatgaattattttcattagatgaacggccatcggttctagatttttatgacaattatgcaaagagtaaaacgaaaacggtggtcattatttcggacgcactacgctatgaaattgctaaggaaattcaacagtcagtggaaaacgagaagaagttttccactaagatgacgacgatcttttctgtgctaccttcagtgactgagtttggtaaagctgcttcgctgcgttctggacaagaaagctatgaatatctcagtggaaatgacgttcatgttaatggtttgccgacacaaggaacaaaagcacgggataaggtgctaaaagtgaaaaatcctaatgcactcgcgatcacttattctgatgttgttgatagaagtaatgcaaaagaattacgggatctgttcaatggcaaggagatcatttatttatatcatgatcaaattgataggaccggagatcatggacaagaaatgcaggtttttgatgcggcagagcgaacggttaaagaactaaaagctgtaattccatatattgctaatggggctaatgtgcaacgctttgttatcacaggagatcatggctttatttatacacgctcagcgattgaagagtacgaaaaaattgagaatccatctaacttagaaaatgatcgagttgaacgacgttttattattagtgatcaccaatatgatgaaattgggattaagtcaatgagattggggactgcgctaagaaataatgatcaacggtacattcatttctctgaaacatcaacaatctttaaaaaagcgggtggcggacaaaattattcccatgggggttcttctccacaagaaatgatgattcctgttctagaagtaaatgttgcaaggggatctgcacaaaaagaaccagtatcggttcaattaatgacggctaaacgaaaagtggtaggactatcaatttcacttgaattttatcaaacagaagcaattagtaattctattacgaaggcacaatatgcactgtactttgaagataaacacggtgttcgaattagtaatgaaaatacttactatgcagattcaacagctggtgcttcaagtgagcgattcactaattttgcttttgaattcgttaaccgaaactatgaaaccaatgaagacatttatttagttatcaagaacgaagaaacgaaggttgagttagatcgtgttgatttcgtgattgataatccatttgccggtggatttggatttgatatttaggaggtgagatttgtggatcaagttattttagataaactcgtcgcaaatttccctgggaagtttgttcgtaaggatctgactaagaaaattaaggaaggggctaatgttccagtatacgtattagagtatttattgggaatgtatgcctcttcgttggacgaagaattagtcgaaaaaggtgttgaaaatgttaagaatatcttagcgcgtaattatgttcgcccggatgaagcggaaaaagttaaagctaagattcgtgaaaatggtggctacacagttattgacaaagtaactgtttccctgaatgagcacaaggatcaatatgaagctgaattctctaacttagggttagctggcgtgcagattagtgatgaatatcctaaaaaatatgatcgcttattaggcggtggtatttggtgtattgttcaaatggagtactggtttgacgaaaatgatcaaagaaattcgccatttattgctaaaaaagtagatccaattcaaatgccaggattagatattgaggaattaaaaagaggacgtgctgcattcacagaagacgaatggatcgatttagttttgcggtcaattggaatggaaccaacacagtttgatgaacgcgtaaaatggcttcatttagcaaggttggttcccttaattgaaaataattttaacctatgtgaattgggtccgcgtggaacaggaaaatcacatgtttataaagaaatatcacccaattctattttagtttctggtggtcaaactacagtcgctaatcttttttacaatatggcacgtcgatcaatggggctagtgggtatgtgggatactgtggccttcgacgaggttgctggcattaatgtcaaagacggtgatcttgttcaaattatgaaagattatatggcttcaggatcatttgctcgtggtaaagaggaaaaaaatgcgtcggcatcaatggtatttgtcgggaatattaaccaaagtgttgatgtgattttaaaaacatctaacctgtttgaaccatttcccgaaaagatgggaacagattcagcattcttagatcggatgcattgttatttaccagggtgggagattcctaaatatcgtccagaattctttaccaatgattacggctttattactgattatttttcggaagtaatgcgagaactgagaaaaacgacctacagtgacgcgattgataagtattttagattaggagcacaattgaatcaacgggatacgattgcagttaagaagatggtttctggcttaattaaattagtttacccagatggaaactttggtaaaatcgaagttgagaaaattctacgattttcaatcgaaatgcgccgtcgagttaaagaacaattgaaaaaaattggtggtatggaattttttgatgtcaatctttcttatattgatttggaagagaatcgtgaagagtatgtgtctgtacctgaacaaggaagtggcacattaattccagaaggaattggaaaaccagggcatatctattctgtttcaaccggggctagcggcagaatcgggacctttacatttgaaacccaaatggtggctggaaatggtaagtttaaagccactggacttggtggggatggacaagctaaagaaaaagcagattcagcttataagtatctaaatgcgaatgcgagctctataagtgctagcatctcaacaacaacccacgattatgtgtttaatacacaagacttaaacggtgttggaaatccggaaatgctatcgctacctgcattgatagcactttgttcagtaactttaaatcgcccacttgttgctagcactgtcattttaggagacgtaacaattggcggaactttagtcaaagtgacgaatttagctgatatgatgcaagtagcaagagattcaggtgctaaaaagattttagtaccgatgatgaatgctgcggatttatcgaccgtaccgccagaattaatggcaacgtttaacatcattttttatcaaacaccggaagatgcagtttataaggcattaggcgttgaatgagattcaatatatagaaatccagtgttttgcgggggatatttagatggcaattacaactaattataaagaactaaaactatgtaaacatgggttacctacatgggatgcgatgttaccagttgttttattggtagcaggtgagcatgccgagccaatcaaaagaagtacgattaaagatgaagctatcaaaaaaatggaattacctaaatcacttcagcaattgaaatcagatagaggcgaaagtattatttatagtcggattgggtggcctatatctgaattggcggttagcggcttattagaacgacccaaacgaggcctttatcaaattacaaacttaggtaagcagttactatttgaaaagggtaataaattgacttctgaatttattcgtcagcaaccccaatatatccaacatcaaaaagaattagtacaaaaaggcaacaatgagattgtagaatcggcgaacattgcaaatgatgatgcagatagtaacccacttcaattggtggattcagtagtgaaaaaatataatgattcagttagcattgagttacttgaacgtattcggaaaggctctccttattttttcgagaaattagttgttgaactccttagcaatatgggctataaaggcgaaaatggacatgcaatggtcacacagaaaagtaacgataaaggtatcgacgggattattaatcaagacgctttaggaacaagtacggtttacttgcaagctaagaagtaccaagttggtaataatgttcagcgtaatgaaatgcaggcattttttggcgctttgagtggctatggttcggatcgtggtgtttttataacaacatctgatttttcggacggtgcagttgagtacgcgaaaaatcagcatatcgtgttaattaatgggttacaattgagcgatctaatgctgcagtatcaggttggtgtgaatgttaagaagcaatatacaacatttgatattgatgaagatttctttattgaagatgattaattgatgaatagaagatagttttctatacgtaatggtcagtaactgtaacctatgcggacggaacagtgattgagtctggtggctctaatgattatccgcctcgctttgggacagttagaaatttgtttaaaccagttcaacaacagtttttaaaagattagatgtgtaatgaataaagccttagggattagtttttcaagctaatccctaaggctttatttttatgagtgctttagttattctcgtagtatcttctccatcgtcttccccttagccagttcatccaccaacttatccagccagcgaattttttgcatcagtgggtcttcaatggcttcaacgcggacgccgcaaaccacgccggtgatgagaacgcaattcggattcatttgaggagcttcctcgaaaaacgtttggtagggaatgtcttttgcgggttgggcagcgagttcggtttgtgagtagccggttagccagcagataatctgattgacttcggcttgggtgcggtttttgcgttcggctttttggacgagcattgggtagattttgttgagcgacatgttgaagatatttgttctgggcatggtagaacctccttaattggtgcgcgagttgggggacattaagtggtgttctaggttggtggcggtgaagtcgcctttgtcgtagcggtggcgcgtttgtgagtattcaaacggtgtgccgttgtcgaggtagacgacttggtcgacttctaggacggggtcggtgctggcgcagtcgatgtatttttggtcgtaggcatcggatttatcggcgcgaatccggcggactgaggggccgatcgttaaaccgagttgtttagtgatgtggctgtagattgatgatttgaggatccttttattaatgccgggaatcacgcaaatcggcatgatcgtatattccagcatgagcggtgtcccgtcgagcattcttaatcgaataatatcatagacagaatcatttttaccgattcttagcttgagttgttccgtttcatcggggaagcgaacttcaaatgaaatcagtttgctttcaatcgtaccaaactgcgcgtaatgtttggtgagccccatgtagtcttgcacggcattgtcatagagtgaaaattgttcagtgacaaaggtgccaacgccttttttaccgtagatcacaccttcaatttgtagtaaatcgagtgctttttgaattgtcacgcgactggtggcgtactcggttgcaagttcggtttgaattggtaattggtcgccttgttggtagtcgccgcggatgatttgattgcgaatgtcgtttgcgattgattgatattgtgccatggcaacctccttttttaaagtcatcataattcagaatcgatagtatgtaaaccaattggttatcaaagtcgctgaataacgatgagtcaggattccatttggcgcgataatcggttacagtgaagatgtaatcgattacaagataatcagaggtgactgaaaatgacagacaaacaatttttctggggcaactcagtttccagcatgcaaacggaaggcggctggaatgaagacggtaagagtttatcggtttatgatatccgcgaagcgagtgaatatgcgagtgattggcattttgccaatgataattatcaccattacacggaagatttcgactacatgcaagcgatggggatgaatatgtatcgtttccagatttcatggtcgcgggtggttaatgatggagatggcagtttcaatgaagctggaattcagtattatgatcggttaatcgatgccttgttagcgcgcggaatcgaaccgatgatttgtttgtaccactttgatatgccgttgcatttggcagaagaatacaatggtttgatgaataagcacgtgttagatgcgtttattcgttttggcaaagagatggttgatcggttcgcggagaaggtcaagtattggatttcgttcaatgaacagaatctctatcatcaaccggaagcgttcagaattagtggttatttaaaaggggaccaaaccacgacggaattgtatcagattgcgcataatgtgatggttgcccacgcgacgatttgtaattacatccatgaaacaactgatgcaaaaatcgggggaatgctggcgtatagtgaagtttatcccgctactagtcaaccggccgatattttagcggcgcgcaagtgggatgaattcattaacttcacgttgctcgactgttatgcgaaggggcagtattcacacgaaatgctgacatttatcaaaaacgcacagatcgatatgcatattttgccgggtgaattggaaacgattcgtcagatgacaagcgacttcttaagctttagttattatgcttcgacgaccattaatgcggcgaagattccagcggggactgccccaaatgattatcttaaatttggtgggcagaagaatccctatattgatgccacagaatggggttggcagattgatccgctcggtttccgcgacgtgttgaataagttgtatcaacgttatcggttaccagttttcccaattgaaaatgggattggtgttcaagaagaatgggatggtcagaatccaattcaagatgattatcggattgagtaccatcaagcccatattgatgcaatgttcgatgcgatgcacgaagacggcgttgaagtccttgggtatcttggttggggcttaattgatattttgagttcacaaggtgacatgcgcaaacggtacggcatggtctatgtcaaccgcacgaatcatgatttgaaggacatgcaacgtgtgccgaagaagagtttttattggtttaaagacttgattgctaagtatcagtgttaaatgttttttaaaaggagtggggttttcgccactcttttttatttacctatttcatttcaaacttattcttgttataaccgataccagttgtccgtgttgtaatacagcggactaaatgttataacagaggagagtacagatgagtattggcgatattttaacgaagacgtttacgaacatggatattgtgagttcgatcacgtcgacagtgtttattattttattaggattctactgccgcaaacgcgagatcttcacggataaatttgggaagattctgtcaaaagtcgttttaacggttgctttaccagctttggcattcaactcattcatgcaagatattaatgggaagactttaaaagaaggcatcaacgttttagtttggggcttcttgatctatattattttaattttaatttcaaaaccattatacttacgctttaagggtgatcaacaagatacattgcgcgtgttgaccatctttggttcaacaacgttcttcgggattccaattgttggagcagttttcggagctaaaggggttatgtatagctcaattttcaacattggttatcgcgtgttcttatactcatatgggtacatcaagatgagtggcttgaagatggaatcgaagaacttgaaaaacatgttcttaaatccaatcgtgatcgccacatttgcggggttaatcatctggttaatccaaggcgcattaccacaagtggcggttgctgggcattcagtggccttcttacgaattgatcaaacagcgccatggttgttcaaaccaatgacgtacttagctagtttatgttcaccattagcttggttagcaattgggacaacgcttggtgaaatcagtttcaaagaagctgcttcggacaagacatcgtggatttatagtattaacaaagtgattttagtacctgctttaaacatcgtgttattggccatcttaacaatgacccacattttaccagttagctatatcagtttggcaacgattgtcatcatgatggcaacgccaacggcaacagtcgccgctgcttacgcgattagttttgacaaggatgcggtcttagcatcgaacgcgtcattactatcaacggtcttggctgttgtgatgacgccagtctggttagtaattttagaagtaatcaaccaaatcggtattttctaggaagagggaaattaaatgtttaaaattgcttgttacggcgtacgccccaatgaagtggcgacgtttaatgaatataataactatgattatgatttaaccttaattgaagaactattaacacacgctaatatcgaaacagctaaaggccatgacgcggtattgttacgcgctaactgtgccgctgatgcgcaaaatatggcgaagttgaatgaatatggcatccattatgtctttacgcggacagtcggttacgggcatatcgatttagccgcagcaggcaagtacaacatggaagttgctcgcgtaccagcctactcaccaaacgcgattgctgaattagctttgacgttagggatgtcattattacgccacaccacttacacgacgaatcggacagcacatcatgattttcgtgtgagcccagtgatgtttagtaaagaagtccgcaactgtacggttgggattatcggtactggtaagattggctataccgaagcaaagctatacaaaggcttaggtgccaaggtagtggggtatgacttgtacccatcagaaattgctaaggaagtccttgattttgttagcttagatgaattattggcgcaaagtgatattgtcagcttgcatattccatactttgctggtcaaaacgatcaatttatcaatgctgatttaatcgcgaagatgaagaatgatgccatcttggtcaatacagctcggggtcaattgcaagataaccgtgcgattatcgatgctttgaaagctgatcaacttggcgcatttgccgctgacgtattaccagctgaaggcgaaatcttcttcaaacaattcccagcagaccaaccagtccctgatgcgacaacccaagaattaattgatttatacccacgcgtcttgttgacaccacacgttggttcgaatactgacgaagccctcaagaacatggtcgaaattagttttgaaaacttccatgaaatcttgacgacaggtaagacgcaaaatagcgtcgcaaccactgaaaattaaagcggttatttgtattttcatgaaaattatgttatattgttatcagtaattagatacttcagagcgagtgagcagaaatgctcactctttttattggagcacgtctaatctgaatatataaatgaattggagggaatcatttgagtaccgttgtggaaacagttcatgatctactcgtgccgatactagatcaacaccattttgagctagtcgacgttgaatttgttaaagaaggtagtagctggtatctacgtgtcttcattgataaaccaaacggcattgaccttgaagattgtgccttagttaacgatgcgttaagtgagaaactggattcaatcgacccggatccaattccgcaggcttatttcttagatgtttcatcacctggtgcagagcgtcctttgaagaaggaagccgattttcaaaatgcacttggcgaatacattcatatctcgttatatcaagccgttgatggcgagaagatttatcaaggaatattaaaggcgcttgatcaagagaccttaacattagccattaaaattaaaacgcgtcaaaaagaagtgacatttaatcgcaaggaaattgccaaagctcgcttagcaattgaattttagtaaaggtaggctagttacatgagcaaggaaatgttaggcgccctagatgcgctagaacaagaaaaaggtgttaagaaagaaatcgtcattgaagcacttgaagcagcgcttgtttcggcttataaacgaaactacggtcaagctcaaaatgtggaagttgaattcgatcaaaagaagggtaacatccacgtttatgctgtcaaagaagtgactgatgaagttttcgattcacgtttggaagttagctatcaagatgctttagaaatcaacaaagcatatgaagttggcgatacaattcgttttgaagtgacacctaaggattttggtcggattgccgcccaaactgctaagcaagttattatgcaacgggttcgcgaagctgaaagaagtattatttacaacgaatacagccaatacgaaaacgaaattatgcaagggattgttgaacgtcgcgataacaagtttatctacgttaacttaggcaagattgaagctgttttaagtaagcaagatcaaatccctaacgaagtgtataacgcacatgaccggatcaaggtttatgtttctaaagtggaaaacacaactaaaggcccgcaagtctttgttagtcggacacaccctgatttggtaaaacgtttatttgaacaagaagtgccagaaatttatgacggaacagttgaaattgtgtcaatcgcaagagaagctggcgaccggactaagatggcagttcgttcaacagatcctaacgtggatccagtcggaacatgtgttggtcctaaggggcaacgggttcaattagtcgttaatgaattacacggcgaaaacatggatattgtgaagtgggaagaagatccttcagactacatcgcaaatgccttgaacccagccgaagtcatcgctgttcaatttaatgatggcaacgaacatacatgtacggtaatcgtccctgattatcaattgtcattggcaatcggtaaaaaaggtcaaaatgcccgtttagctgctaagttaacaggttacaagatcgacatcaaacctgaatcagaagtcgaatttgtcgatggcgatgatagtgaagatgaatcagccgtggttgaaggtttcgaagaagaaacaatcacaccagagactactgaagaaacagttgcagtagcccctgaaacggcagaagttgctgaagacatcgaacaaccagcagaaactgttgttgattctgaagaacaaccacaagaataagtgaggtgttcatgatgaaacaaagaaaagtaccaatgagaaaagacgttatttcacaagaaatgaagcctaaaaaagaaatggtgcgaattgttaaaaccgctgaaggcgaaattagtatcgatccgactggtaagaaatctggtcgcggtgcctatgtttcattagaaccagatgcgattaagaccgcgcaagctaagaaaatcttagaaaagacttttggcattgatgtttcagcagacttttacacagaattgttcgagtatgttgaccatcaaaaggcccgtcaagaactatttggagaacgaaaatgagtgaacaaccagaccgtttattgcaactcttaggcatttgtatgagagcaaggcaactggtcagtggggaagaacaggtcctaaaagccattcagcagtcaaaagctaaattggtttttatcggccaggatatcagcccactgacgcagaagaaattgactgataagagtcatttctacaaaatcccagaaacaaaggcctacaccgcggcccaactaacccaagcaattggattacatagagccaccatagcggttgtcgacgctgggtttgccaaaaagatgataacgctactgggataataaaggagcgtgaagatatgggtaaaaaacgtatctatgaattagctaaagaaattaatgttgctagcaaagacattttagagactgccaacaaaaaaggctatgatctcaagaatcacatggcaacaattgatgataatcaagaaaaaacattgcgagctgctttccaaacaaaagcaacaccagctgcaagtaaaccagcaacacctgccgcacctaaagcgagcgaaaaatcagaaagtggtaagatcaagattagtaaaactgctatccgtcgccgcccagaagccgacaaaaaaccaacacaacattcaaataaccgaccacaagctaatgctaaccgtaacggtcaagcaagcagtggtcaaaaccggacaaacaatgcgcgccctaacaacaatagcgcgcgtccaaataacagccgccctaacacaaatagtcggccaaataacaatagccaaaatcgttcaacaagcgctaatcatccaatgagcttacaagaacagatttcacaggctaatgcacgtcgtcaaagaacccaagaacggattcaacaacaacgtgaacaacgtgaagcagacgaaaagaagcgtcgtgaacaagcaagtcgtccacgtccaacaagaaacaatgcttcaaacaaccgcccatcaaacggcaaaccaacaaacggtgcccgtccaacgactaacagtccacgaccaaccgttacaaaagatggtcgcccattaggtagcagccgtccaaacaataacaatagtgcacgtcctaatacgacgaataaccgaccaacaaacagtcgtccagcaacgacaccatcacggccagtttctgcacaagaaatgcaacaaaaaatgcaagctaatactgttagtgcttctaaaccagcatcaagcaatacagcaagcaagccaaagaactttggcccagataaaaaacgtggcggtggttataacagctatggcaatagccaacaacgtttcaataagaaacgtaagaagacacgtaagcaacaattagctgaacaaaacgcagctaagaaggaaatgccacaacgtaaagaacgtccattaccagaagtattagttttctctgaagggatgaacgttgcggatatcgctaagaagattcatcgcgaaccagctgaaattatcaagaagttattcatgttaggcattatggttaacatgaaccaatcacttgataaggatacgatcgaattattagcaactgattacggtatcgaagcagaacaaaaagttgaagtggatatcgctgatattgattcagtctttgaaacagaagctaagagtgatgctaaccttgtaagtcgcccaccagttgtcacaatcatgggtcacgttgatcatggtaagacaacattattggataaccttcgtaacagtcacgttactgatggtgaagccggcgggattacacaacatatcggtgcttaccaaacgaagttaaacgatcgtttaatcacattcttggatacaccaggacatgcggccttcactaacatgcgtgcgcgtggtgctgatattactgatatcatcatcttagttgtcgctgctgatgatggtgtgatgccacaaacaatcgaagctattaaccatgcgaaggctgctaaagccccaattatcgttgcggttaataaaatcgataaaccaggtgctaaccctgaccacgtgatggaacaattaatgggttacggccttgttcctgaagactggggtggcgatacaatctttgttaagatctcagctaaaactggtgaaaacattgatgacttgcttgaaatggttcttcttgaagccgacgtgcttgaattgaaggctaaccgtgatcaaaaagcggttgggacagttattgaagcccgccttgataaaggtaagggacctgttgcctcattattagtacaacaagggacattacggatcggtgatccaatcgttgttgggaatacctttggtcgtgtccgtgtcatgacaaatgatcgcggtcgtcgtgttaaagaagtcttcccatcagaaccagttgaaattactgggttaaatgatgtgccacaagcagctgatcgtttcgttgtctttgaagacgaaaaaacagctcgtgctgctggtgaagaacgtgctaaacgggccctcttgaaggaacgtagccgttcaaaccctgtcacattagataacttgtttgaaacaatgaaacaaggtgaattaaaagaagttggcgttattatcaaagccgacgttcaaggttcaacagaagccttagctggtagtttacggaagattgaagtcgaaggcgtacgcgtgaatattattcatgaagccgttggtgcgattaacgaaagtgacgtcacattagctgctgcaagtaacgctatcattatcggtttcaatgttcgtccgacaccacaagctaagatccaagctgatgctgaacaagttgatattcgtttacaccgaatcatctacaaggcaatcgaagaaatcgaagctgctatgaagggtatgttagaaccagtttacgaagaaaaagtaacaggtcaattaactgttcgtgaaacatataatgtttctaagatcgggacaattgccggttgtatcgttgatactggtattatccgacgtgatagtggtgtccgcttgattcgtgatagtatcgtgatttatgaaggtaaactttcaagcttgaaacgtttcaaagatgacgttaaagaagttaaaaccggctttgaatgtggtgtgacaatcgaagattacaatgatatcaagattgatgatcaaattgaagcctacgtgatggaagaagtacctgttaaataattaatttacaggaggactacagatgaaacatcgtgtcggtcgtgttgaacaagaaattcaacgtgaagttaatgatattttattaaaacgtgtacgtgatccccgagttgaaggggtaacgattacagatattaatctgagtggtgacttacaacacgtgaaggtttattacagtatcttgtctaatctagccagtgatgctgaaaaagcacaaaagggtttggataaagcaaaaggcttgattcgtagcgaacttggccaacgaattaagttatacaagattccagaaattacctttgaacaagatggttcagttcgttatggtgaacatatcgacgaattattgcgtaagttacatcaagatgaagcacagcgttaggctgtgaccaagagcaccgacgaaattcgtcggtgctctttttttgttttgatgaccttatgaaaaccataatcccttaaattgacacggtagattgcaccatattactattgagctatagacaactattgttattgacagttattttaaactaaaattaggattattttatgacttatcgaggaaagttgttgatatgatttcattgttagctgattaaaattcgctctgaaatgaggcctgatatatgctattgatagactatttcacccaaatattaatctacacactggtttcttatccgattatcggggggttatcgtttattgtttctagtttgtattattggctattaacggagaaggaagatcaaccacgttatctaaaaaaagggaacaccattcatcacgattttagtgccggcgcataatgaagaagcttcgattgaagccacgattgatcatttagcaacccaaatgaattatccaaccgatcaatatgaaatcattgtcgtcaacgatgggtcaacggatagaaccggcattattttagaagcattacaagcaaagtatgggcaacggttacgaacggtcacgattattaataatcggggcaaggcagccggctttaatagtgctttaggatttgccaaaggcgaatttattttgtccaatgatgctgattccaaaccagaagttgatgccttatggaagtatatgtactattttgagcgtgaaggcggggcgcaattaggtgccgtgactggcaatatgttatcgatcaataagacaactttggtggcagaagcccaacaaaatgaactcaattcaatcattgggctcattaaacgttcacagctttcttatggcggcttgtttgccttttctggggctaatacgatataccgcaaatcggcggtaattgatgttggtggttggcaagcaaaacaaccaactgaagatattgcaatttcatgggatgtgcagaccgcaggctggcaggcttattttgcaccgcacattcggttttttatggatgtgccagaaacactaccggaactcgttaagcagcggcgaagatggacctctggcgggatctacgtgctcttgacgaaatcgtttggtattttacggcacccaattaagcacttttcgatggtcccgattatcattgattatggtttgagtatcatttggtcgttattttattggatcagcatggcgacttttattgtccttcaaattggttacgtaattaatcaggattggcaccggctcctttcgagtttgtctattgcagcaatttttaccacgattgaaatattggtcggattaattcaattggtgcaagcctcctattttaatgatgggggccgctcgttgaagtatatcgcttttgcgccttggtatattttgatttattggatggttaatacgtataccgtagcggtcgagattatcccaacgattcgccaaattatcaggggcaaagatgctggggtttggaaatcaccgaaacgttcgaccgaagcaaccggaaaacgagaaggagggaattcagatgagtaaaccagactatattcgccatcaattaagtgaagatcagattacaatcgattggctttttacgtctaaaaagactggtcatcgtttgcgtcaattagtgttgattggcattggctgggtaatgtgtctgattcccaccgcgacaacagttggtatctatctaacccgtgaaacaatcattccggttaatcgggtcgcctttaaacaattattacagaatacgaattatatcttcttgcgctatattatcgttttttcagttttctttatcagtctctatttaatgaataaagtaaaacagtatcggattagaaagggtatcgctaaaacgtttgatgaacagcggttacagaagcgattagcctgggccgaagagatgtatactgctaaatatggtgcagcaagcatgcgtaagcagcgccaaaatatcattattcccgattttgccgatgttgggacttatgagttacgtcagcgctttgatgcttttgaggggggaaaacgatgatttctaatgaagatcaagctgtcatagatgagatgattgcccgcgaacgaactatgaaagagcggcaaaaaataattgaagcgatgacccataaacggcgggtttttaaacgccgcttagtgattgtttgtgcgactgtgttgaccatttttttagtaatcttatatgattgcctgatggcatatgaaggctagccaatgatggggattgttaaaattaatattttagttgcaatcgtaatgtttctactgagtttagcaatctttcaaaaactgattaaacatcgccctttaaaaaatattgttcaacgacatcatagacagctggataagcgttatacggatgctttatcggcctctaatcggtggttgcagttttattatcatcaacgagaaatatcacaaattattccccaaattctttattatttagaagccaatccggcgttagagacaattgacgatgcgattgcttatattgataatcaaacagctagttcagagacataccagaataacttaaacgcgtttcgcaattacgttaagcaatttaatacaatcctgctaagtacggcggacgaacagggacagccatctagtcgacagattagttttgttacgctcaatgatgtccctaatatctggtattttggaacggacccggaagcaccgaaagtgagtgaactggatctaggccgagctgcaatttatacgctacccacgagtgaggggttgaggattaccagtaatcggctcaaggtataccgcacccagtatagttttagtgatgtagcggctgcttatcaagcacaggtaccaggctatatggagagtctctctaaggcagaaagggaaagagaaattatttttgccattgaattagaaagtgcccggatcgatagtcggcttcaaaataaagaaattaccttcataaaataagcgccgagacaacttaatggttgtcccggcgttttgtgcgttaatgataaattgtggcgcataggaaagcaaatcccgttcgagccagcactctatgctataatggtttagttaatagttaaaaggagattacttatggacggcattatacccttatataaagaacgcggcatgactagcaacgattgcgtttttaaagtacgacggattcttcatatgaaaaaagtggggcattctggaacgcttgatcccaatgtagatggtgttttgccaatctgtattggccaagcaaccaaggtagtggaccaattggtgcactctggtaaagtttataccggtgaaattacgttaggtttatcaacgacaaccgaagatttagatggtgaagtcgttgaagaacaacggttagctgaaccaatttcaaccgaaaaaattaaagaaacactggcaagttttctaggggattcaatccagattccaccgatgttctcagccgtaaaagttaacgggcgccgtctatacgattatgcacgggccggcgatcctgtggaacgcccacaacgcaaaattacaattacgcaatttgacttgcaaggcgaaccagaattcgatgcaaaaacgggtcgccaaaccttccgctttattgcgggctgttcaaaagggacttatattcggactttagctgtcgattttggccgtaagttaggcttaccggcagtcatgtctgatttaacgcgtcttaagagtggtggcattcaaattggcagttgcgttaccttggcacaactggctgaagctgctgataacggtcaattagcggatattttgattccgttagatcatgtttttgaagaaaacgtcaagattgcgcttgatgatgatcaatgggccaaaattttaaatggtgtcttcttaacgttcccagaacaaacagaagaaatcttagccttaacttacgaagggcacatcaaggccttgtatcaagtggctaacgcgaaacaacatctctatcgaccatataaaatgtatttacaaaaccaagggactcattaaaaaaactaggtgaaaaaaatgcgtgtgattgaattaatccatccctattcaaaagaacaagtaccagccgaagaaattgtcttagcactcggcttttttgatggtgtccaccgggcacatcaagcagtgattaagacggccaaagatttggcggtgcaacagaaccgaccattagcggtgatgacctttgatattcatcctgcgattgtttaccgaaatgtcaatcaagccgattttcattatttatcgacagttgaacggaagcaagaattaatggctgatttaggtgtcgatattttatatgttgtccattttaacgatggctttgccaagttggcaccccaagatttcgtcgatcaatacttagtggcgctccacgcgaaaacggtggtagctgggtttgattacacctatggtaaaaaagacatcgctaatatgcagacccttagtacgtatgccaaagatcgttttgaaatcgtgacggtggcggaacatgactatcaaggccataagattggttcaactttgattcgtgaaaatttggatcaaggtcaagtagcggccgctaacgagttgttaggttatgtttaccaaacgactggggaagttgttcatggtgaagctcggggccgggaactcggctttccaacggctaatattgaaagtcaaaaaccagaacgtttaccgggcattgggatttatgcggtccgcttattggttcgcggccaatggtactgggggatggcgtcaattggccggaacgtgacgtttcatgccaataatcccgtgacagttgagattaacttactcgactttagtgcggacatttatggtgaacaagttaaagttgagtggtatcagtatttaagaggtgaagtgaagtttgattcggcagaagcgttgattgaccaactccaccaagatgaagctgatacccggacttattttgagaaattagaggcccaacattaatggcaggcgcatatattcatattccgttttgcgaacatatttgttattactgcgacttcaacaaggtcttcattgaaggtcaaccggttgatgagtatgttgacatgttaattcgtgagtttcaattagtaatggcggaatacccagatgagaaaattgaaacgatttatgtcggtggtgggacaccaacgacactctcaccagcccaactacaacgtttgttggatggcattcatcagtacttaccttatgatggcggcgagtttacgtttgaagccaaccctaatgatttacaagataccgctaaattgcaagtactaaaggataacggcgtcaatcgcttgagcattggcgtgcagtcttttaatgatgacattcttaagaagattggccggattcatcgcagtgctgacgtttaccgggccatcgctaatgcgcgccaagttggttttgaaaatatcagtattgatttgattttccgactaccgcaacaaagcgaagccgattttatggacagtttgaaacaggcaatcgatcttgatttgccgcattattcaacttattcattaattttagagaagaaaacgattttctataatttgatgcgccaaggcaagttacgcttaccatcgcaagatgttgaagcacacatgtaccaaaatgcgattgatagtttccaacaagctggattagaacaatacgaaatcagtaattttgccaaaccaggctaccagtctgcacataacttaacctattggcggaatgaaaagtatttcggttttggggctggtgcttatggctatctgggcaaggaccgctaccacaattttggcccaatccaacaatacttagagccgctacaagcacataaagtaccagtgattgaacgccacgtgcttcccttgaccgaacaaatggaagaagaactcttcttagggcttcggacaatgcaaggtgtctcaatcaagcactttgaagaaaaattcagatacccactacagaatatctacggcgaaacagtcgccaatcagattgaaaaagggtacctaaaacaagaaggcgactggctaagactaactgaatcaggaaagttcctaggcaacgaagtcttccaggaattcttgttagacagctattaagtgagtgccttcaaaccggttatattccgagcaaataggatggtgatcatttttggttagacaccttttacaattacgggccgtttcacaagcagttgcttctaagttaagcagataacaaaaacttagaagcgaggttttatgaaatggacaagaatacttatcaacattggtcagaaacaaaatatttaaaggatttggtgacaaacccattaattgaagtcggcgattattcttacttttcggggtattatgatcaccagaattttgaggacggctgtgttcgatatcgttggggcgatgatgcctcacgtgccttatttaatccacaggctgaatttggttggcaattggaccgcctaattattggccgttacgtttgcattgccagtggcgttgttattttgatgggcggtaatcatgatcatcacagtgattggattagcgcctatccgttcccagaacaaattgcggcctcttatgagcccaagggtgatacaatcattgaagacggtgcgtggcttgggatgcgtgcgttaattatgcctggcgttcatattgggcagggtgcgattatcgctgccggtgcggtggtggttaaggatgtgccagcgtacgctgtcgtcggtggtaatccagcacgggttttaaagtcacggtttacaccagctgacattgaaaccctgcaagcaattgattggtaccactggccaattgaaaaagtccaagcagcccaatcaatattagcgagtcattcagtcgctgatttacaacaatttcacgagaattattgatagcaatctttgaaaaggtcacactcatcatttgggtgtggccttttatcggtctttggtcccattttcattaaatccgtgaaaattacagttcaattcttgactttatttgacgttcttgctatattaatacttgtaattagcactcgtaataatcaagtgctaaaaagaggtgataacatgctgaccgaaagacaattaatgattttgaaagaaattattcgtctttttaccgagagtggtcagccggtgggttctaagaagctaatgtctgaactaccaatgcacgttagttccgcgacaatccgaaatgatatggctgatcttgagaatgtcggtttaatagagaagacgcattcgtcttctggacgtgttccttctatgaagggctatcgttactatttagatcatctcattcagcccgctgtcttaaatccaatggatgttgcgactgtgcaacaatcatttggacgccattatcataagattgacgagattgtttcacaatctgccaatattctttcaaacctaacgagctatacagcgattacgttaggaccggagatggcagagattcggttgacaggtttccgacttgtgccacttggtaatcaccaggtaatggcgattatcgtgacaagtgccggaacggttgataatcaggttttcacaattccaaacgcgatttcaggtgatgaacttgaaaaagcgattcgagtcgtgaatgatcatctaatcggattaccgttgaccgttgtcagtcagaagttgaaaatagaggtgcctgcgttattaatgcaatacatgggctcaccgggcggctttttaaacatcttcgatgatgtcttaaaacaagcctcacaggaacgtttatatgtggggggccaatcgaacttattaaacttctcagaattgacggatgtgtcacagttgaagtcaatctacaacatcattaatcaatcggacgatctagccaagttgctagagttatcaccgggtgaggccaatagccaagttcaggttcgtttgggcaatgaaatgaccaatgatttattgaagaattacagtttaatgactgttaattatgatgttggtgaacacggccaaggattgattgctttattaggtcccactagcatgccatattcgcgcatgatcgggttactcgatttattccgcgaagaattagcgaagaaactaattgattattatgcagattttgatgatagtcaatcttaaaaggagcgtgtttgtttgacaaagcaagaaaaggctgaaaaccaagaaaagccaactgaagaaactgtagaagaaacgcctaaaaaagaaacaccatttgaaccagttatggaagctgatgaagttgaagaaacaactgaagcacaagcacctgttgaagaagcagatgataaattagctgaacttcaaaagaaatatgacgctatggaagatagtttcttacggtcacaagctgaaattaagaacatccaaatgcgcaatcaaaaagaacaagctaacttgttaaaatatgatggccaatcattagccaaagatgtcttacccgttttagataatctagaacgcgcattggcagctgaagcaactgatgaaagtcttaaaaagggtgttcaaatgacatatgatcatatgaaacatgctttagaagaccatggtgttaaagaaattgaggcgcaaggtcaagcctttgatccgaccattcaccaagccgttcaaacggttgcggttgatggtgatcaaaaagctgacaccgtggttcaagtcttccaaaagggctattatttgaaggaccgcgttttgcgaccagcaatggttgtagttgcacaataataaaatttaaaaaattaaaaaaagagggtattttcaatgagtaaagtaatcggtattgatttaggaacaacaaactcagctgttgccgtattagaaggcggacaacccaaaattattacaaatccagaaggcgctcggacaacaccatctgttgtatcattcaaaaatggtgaaatccaagttggtgaagttgctaaacgtcaagcaatcactaacccagatacaatcgcatcaatcaaacgtcacattggcgaagcaggttacaaagtaactgttggcgacaagtcatacacaccacaagaagtttcagcaatgatcttacaatacatcaagaaattcgctgaagattatcttggtgaagaagtcacagaagcggttatcaccgtacctgcttacttcaacgattcacaaagacaagctactaaagatgctggtaagattgccggcttagatgttaaacggattatcaacgaaccaacagcttcagctttagcttacggtttggacaagacagaaacagacgaaaaagtcttagtttatgaccttggtggtggtacgtttgacgtttctgttcttgaattaggcgacggtgtcttccaagtattatcaacaaatggtgatacccgtttaggtggggacgattttgatgaagctatcatgaactggttagttgaaaacttcaaatcagacaatggtatcgacttatcaaaagacaagatggctatgcaacgtctaaaggatgctgctgaaaaagctaagaaagatttatcaggtgtatcaagcacacaaatcagcttgccatttatctcagctggcgaaaatggtcctttacatttagaaatgacattatcacggactgaattcgatcgtttaacatcagacttagttgatcgtacaaaagcaccagttatgaatgctttgaaagatgctggcttagatgcaaacgaaatcgataaagtcatcttaaacggtggttcaacacggattcctgctgttcaagaagctgttaagaactggacaggcaaagaacctgatcactcaattaaccctgacgaagctgttgcacttggtgctgctgttcaaggtggcgttatctcaggtgacgttaaagacgttgttttacttgatgttacaccattatcattagggattgaaacaatgggcggtgtcttcacgaagttaatcgaccggaatacaaccattcctacaagcaaggcccaaacattctcaactgctgctgacaaccaacctgccgtagacatccatgtcttacaaggtgaacgtccaatggctgctgacaacaagactttaggtcgtttccaattaacagatattcctgctgcacctcgtggtgtgccacaaatcgaagttaaatttgatattgataagaacggtattgttaacgtttctgctaaggatcttggcacaaacaaagaacaaaaaatcactatcaagagtaactctggtttatcagacgaagaaatcgatcgtatgatgaaagaagcacaagaaaacgaagaagcagatacaaaacgtaaagaagaagttgatttgaagaacgatgttgatcaattaatcttccaaacagataagactttgaaagaacttgaaggtaaagtttctgacgaagaattacaaaaagcaaaagatgctaaagaagaattagttaaagcacaacaagaaaacaatcttgaagacatgaagacaaaacgcgatgcgttaagtgaaattgttcaagaattgacagttaagttatatcaacaagcccaagaagcacaacaagctgctggtggtgctgaaggtaacgcaactgatgctaagactgatgacggtactgttgacggcgacttcgaagaagttaaagacgacaaagaataagaacgttaaaaaaagccaaaacctagtatggtctagggctttggctttttttaatcaatcagttatgctattcttgttagggtagatttaacccgtaagtaaatgaatggaggcccacaatggctgaaaaaagagattattacgacgtcttaggtgtcggacgcgatgcttctgacgatgagattaaaaaagcctatcgtaaactttctaaaaaatatcatccagatatcaataaagcacctgatgcagaagcaaaatttaaagaagtaactgaagcatacgaagcattaagcgatcctcaaaagcgagcagcctatgatcaatatggtcatgcgggcatgaatggcggttttggtggcggcgctggtgctggtcaaggctttggtggcttcggcggtggcgcagaaggtttcggcggattcgacgatatcttcagttcattcttcggtggcggggctcgtcaacaacctaatggcccacgtcaaggttctgatttacaatatcgaatggacttgaagtttgaagaagctgtctttggtaaggaaacaaagatttcttacagccgtgaagccgaatgtcatacttgtcacggttcaggtgctaagcctggcacaagtgctgaaacgtgtcataaatgtcacggtgctggccaaatccaagtggaacgtcaaacaccacttggccgtatgatgtcacgcgaaacatgtgatgtctgtggtgggactggtaaggaaattaagtcaaaatgtgatacttgtcatgggacaggtcgcgaagaagaacgtcataccgttaaggtgaaagtccctgccggtgttgaagatggacaacaaatgcgtcttcaaggtcaaggtgaagccggttcaaatggtggcccttatggggacctatttatcgtcttccgcgttgcacctagtgatgagttcgaacgtgatggtgctcagatttttgttgaagtaccaatttcattcgtccaagccgctttaggggacgaaatcgaagttaacacggtccatggtccagttaagttgaagattcctgctggtacacaaacgaacactgttttccgtctacgtggtaagggtgcgcctaaacttcacggcacaggtaacggtgatcaaaacgtgacagtcaacgtggtgacaccaaagaccttaaacagtaaacaacgagatgccttaaaagcatttgcagtagctagtggtgactcagttaacccacaagacaacaacttgttcgacaagattttaaataaaaaacataaaaaataaaagtacattaaaaaagccgtctactaattagtttcttagtagacggctttttttaataccttacattctttgttgactatggtgatagctataactaaagtaaatcaccaatccgataacgagccagatgacaaagacaatccaagttgtcatttgcagttgcgtcattaagaggacgcagaggatgcatgagaggattggcacgataggatagagcggtactttgaagccttgaggcaactcattgtagtttggaattcttcttaagaaaatcacacctaatgagacagttgcaaaggcaaagagggtgccgatattaaccaattcggcaattttatcaagcggtacgagggcagccacgatactggtaacgactgcaaaaatccaagtattggcaactggcacgtgtgttttaggattaatcttggcaaagacggccggtaataaaccatcgcgactcattgcgaagattaaacgtgttccaccgtaagtcatcacgagtaaaacggttgtcatcccagcgacggcacctaatgagataatgccggccacccagttttggtgcatcaattgtaatgcgaaagccacaggatcaccaacgtttaattttgtatagtgaacaacacccactaatactgttgcgacagcggcatatagtaatgaagcaattaacaatgaggcgataatcccgattggcatatcacgttgggggttaataacttcttcagaggccgttgaaacagcgtcaaacccaatataagcgtaaaaggctagggcagcaccagataagacacctgaggcaccataagggaggaatggttggaagtttgctggtttaacgtagaaaatggcaacgccaaggaaaatgacgatgacggcaattttaacgccgaccataatggtattaatccgggtagattcgcgcataccatttgagagtaagaaaccgacaattaaaacaacaattccggcaattaaattaacaccggctggtttaccaggttcccacgctgctgaaagagcagttggtaaatgaagctcaaagccggccattaaattttgaaaataagctgaccaactaaccgcaactgaagcaaccgcaaatagatattctgaaaccagtgcccagcctaaaatccaagcgactaattcgccaaagacggtgtagacgtaagtataggcactaccagctagtggaatggtagaagcaaattcagaataacaaagggctgctagcgcacaaacaacggccgctaataagtaagataacattgcccctggaccggcatatttagccgcaataattccgggtgtgatgaaaataccggcccccacaacggcgccaacccccatagcggttaagccgaccgctgttaagtttcgttcaagtaagccatttttaaattgacttgcatcgattttctttttagcaaataaagaatgtttggacataataggactcctttgattaatcatttagtagtaaatagttattattgtaagctgtgaaggagcaaacagtcaatagggataagcaataaaaaacactatgccgtgcgagcggaatggtgtttaaatagcactagcttagattaatttccagtgtcttaagccttcaataatgccaccttctacgttggctgatgtgatgtatttagcttgggccttagcttctggaatgccgttgcccatggctgttggataatcgacgtaactaagcatcgggatatcgttgcgaccatcaccaaaagcataagttggcatgtcttctaatccttgagaagcaagtagtcgcttaataccagtttgtttagaaccgttcttttcaacagtatcgattgaataaggtgtgttccggtagaatgttaaatcgtctgttgcataagccgcatcattgtcgttcgtcaaaattaacagcatataaattggatggtttaagtaatattctggatcaacacttggtactggtgcgttgacttcagcataagcatctttagctgcttgtgtaacactggtaattcgaatggcttgatcatcataaaaggcaactgcttcgccagcttcttgagcgattgtaaccacttgttcaatcgtcttagttggaatagtgccttggtaaaccggttggccttcaaattgaatgtaactaccgtttaatgcgatgaatgagtcaattccggtaattgctaatgcctcttgaatttcaagtggtgaacggccggtagaaatgattgggaggtaatggttggcgcgtagttgtttaacagcgatggcgactgctgggtctacgcgagagtgttcgttgtaaagtgtcccgtcaagatcaaaaaatacaagtcctttataggtcaaaataagtgcctcctaatatcataataaactccatgctagcatggtttcagcatgcatgcaaataaacgtccttccggtttacaagatggctaaattgttcatgtgtttgattaatactcccccgagtaaaactgctataactgatagtgattgatgattgtctgggcaatttcacccaatgaatgatcgctttttaaagcctgatattccgctgcgaggtcaatctgttgttgattaacttcgagatagagaataccaaagcaatgaaaatcgattgcaggtgaagttcgttcataaatcatgaacttcaaatcttgaagaatcttcaggtttttgaaaaaaagtgcttcgtgttcgatcaagttgaccacctcctctaatccgattggccataaaaaaagggcctaaccaattggttaagccctagcttacaggagatttaattttataaaagactagttgagcgttagaaattaatttttgacttgcgtataaatcacttaaattataaattaattttaacaagcgtgtcaagattcgtcaattcaacgtggtaaatttcatagcttcttcatatttaattcatccgccattggttaagatactgtataataagaatataatcacacaaaagagaaggaattctaatgaaaatattaatggttgaagataataagtctgtctctgaaatgatgggcatgttctttcaaaaagaagcgtgggatgcccactttgcgtatgatggtaatgaagcggttgaacaatttagtgttgatcctgatagttgggatattattacgttagatttgaatttaccaggaatggatgggatgcaggtcgcccaaaaaattcgggagcagtctaaagtggtgccgattattatgttaacggctcgcgattcagagagtgatcaagtcttggggctcgaattgggtgcggatgattatgtgacgaaaccttttagcccaattacattgattgcccggattaaggcgcttcatcgccgtgctgagttagttgatgaacaagttggcgcggaagacgcgcaagttgaagaagtagataactccgattacgatgtacaaacagatcacttcaagatgagctctaagacgcgcgaggcctatttaatggacgaaccgattttagatcttacgcccaaagaatttgatttattgaagactttagcgaagaatccacgccaagttttctcacgtgaacagttattagaacttgtttgggattaccaatattttggtgatgaacgaacagtcgatgcccatattaaaaaactccgtcaaaagatcgaaaaggttggtccccaagtgatccagacggtctggggtgtcggctacaaatttgatgattcagcggtcaataaacactaatgaaactgatctatcagtggatgctagccttttttggggttattatgacgaccatcgtgatcgttggaattgcgtttacgcagtattcaacgaagacggcttataataatacgtgggatcagttggaaggttacgcatcagttattgaacgtgaagcattcaaacagggctcacaggcaacactatccaagcagtttattgatgatagccaagccatcctgtcgcaacaacgggttagttttaatttctttaatgcgcaaaatgaaatggtttacccagcgcctaattcgaacgtttctgttaagaaaaagtattggaaatacctgaagaaggggcaggtccaacgactcagtatgagcaaggactcccggcaatttaataatgatcaagatcaactggttgtttttaaaccggttttctataatgataagctgatttatgttattggggttggttcctccattaaaaacgttaagtcgggcttagtgacgatgcgcaagaatttattgattgccttcttactttcgacgattggtggcattttactcagttacgtcctagcgcgctaccagatttatcggattagccgtttacgaaatgcaacgcatctggttgccgaaggggattttgatgttcatatcgataaccctggtaagaatgaattggatgatttggcgaccgactttaacgaaatggtccactcgcttaatgaatctgaggccgaaattaagcggcaagaagatcgccgtcgtcaatttatggccgatgctgcacacgaaatgcgaacgccattaacgacggtgaaagggctattggaaggcttagcctacgatgccatcccagaagaaatgcgagaaaagagtatttcattaatgcaaaacgaaacgaatcgcttaattcgcttggttaatgagaacttggattatgaaaagattcgaacaaaccaaattaaattgaatcaacaaacatttaatgcggtagaagcgttgcaaaacattcaagaacaacttcagaaaaaagcggcggatgccggtgacaccattgtgcttgaagcacaagaagaagtggctatctatgccgactatgaccgctttgttcaggtcatgtttaatatcatgcaaaatgccatccaatttaccaataacggacagattacggttactgcagaagctgggttccacgaaaccattctgacggttagtgatactgggattgggatgacccctgagcaagttaagaatatttgggaacggtactataaggctgatccttcccggaagaacacaaaatacggtgaatctggtttgggcttagcaattgttcatcaactggtccaattacatcatgggaccatcgaggttcaaagtgaaccagatcaagggacaacctttacattaactttcccagacgaaaccgtcacaactgatgctaattaataaatacgcaaacaaaaaacgcagcctacaaggttgcgtttttttagcttttaaataaataactgagtggtagccggttgtgtttcgctaataatacgaccagcgtggattgatagcgtaacagcggcccgttgattaattgcgttatagaaattatcactagccattaagattaagtgggcgggtttcccaacttcaaggccgtattggtcagtcacgtgcattgcccgagcgccattgtgggtaatgaagcggtaagcattcatgatttctgtataacccatcatttgagtggcgtgtaaaccagcatggaggacgtctaacatgttaccatcgcccatagggtaccaagggtcttgaatgtcatcttcaccaaacgcaacattcaatccgttagctgttaattccttgacccgggtgagaccgcggcgtttgggataggtatcaaaacgcccccccaagaataagttgaccaaggggttagcgataaaattaagatcggccatttttaataagcgcattagcttatacatgtaagcatcattgtaacagcccattgctgttgtatgcgaggctgttaccttatctttcatgccagtttctaaggcgagtgtagcgactgtttcgaggctccgtgaattaggatcatcgatttcatcagtatgggcatcgaataataaatcatattcttgcgctaattcaaaggcaaatttcaaagattcgacagcgtattcccgattgaactcgaagtgggggattgctccaatggcgtccacccctagttgagcggccttagtcattagcgccttaccgtttggaaaggagagaatcccttcttgtgggaaggcaacaagttgcaatgtcatccagtctttcacttcttcgcggacctcaatcagtgctttaagggcgactagttcaggatcagtgacgtcaacgtgtgagcgaacaaactggaccccatgactagcctgcattttaagtgctttgagggctcggtctttaacatcttggtgtgtcagtgttttcttacgttcggaccagattcgaataccatcaaaaagtgtgccagattcattccattctggttgtccggcagttagtgttgaatcaagatgaacgtggggatcaacaaacggtgggagcgctagctgttgttggccgtcaattattttttcattttgttggggctcaagatgtgattcaatcgctgttataagatcgttttcaattctaattgattttaaagctgtctggttctcgatatgaacgttttgaataagcatctgaatccatcctcgctattttttaatagtgagtataacaatactgggttgactttggcaagtaggtttaatacaatgcctataaatataattccttttaagtgcagtccagagaggctgacaaaggagcgactatcgggatttaatggcctcgctctgttttggagtgggccttttttgtttgtgatagtcgaagttggaggagagaaaatggcaaaacaacatacgattcactcagtcgctaagtctgaaggaacgatgggtgattgggatttatttgcgacctggataggtgccaacgctaataatgggacgtggtacatcggcggtattattgccgcaactggtcttattcaaggctctacactgttgattgccatcggctgtttatcctatgtcttattagcacttgcttcttatatgggctatcaaactggtgtgggtgcaatgggtttaacgcgtgcttcgtttggcgttaaaggttcagtcttaccgtcactcattaacgtcgtgcaattcatcggttgggcagccgttaatacctatattgcggcgacttctgtgagctttattttgaaagaaattatgggttggtcgggcaatgatgccgctacgaatcgtttgagcttggttgttgggatcatcatcatgtccatcttgcatcttatcagtatttcgttaggtgaaaaatcagttcgttggattgaacggattgggattgtactcgtgattatcttagtgacatgggaatcaatcattgttttcaaaatggtaccgttcaaggatctggtggcttggcgtccagctgccaagtttcgtcttgaagccggtcgagcaatcgatattttagccgcctttaatttagcgtgggtcacagcagctgctgactttagtcgttttgccaagcgtaagaaggccgcaactgtttattcattcctaggggctaatatcggcttattctggtttgccttcatcggtttgacggcgacaattgcgaccgcgattacgttgaatcattttgatcctaataacgctgatccaagtacgattgccgctaaattaggactcggcgttttagccttgttggtgattgtaattactagtacaactgcgaatgctgttaatttaatggctgctggttcagcgctcactaacatttttccaaagctcaagttaacaccagcactctggtgtgtcaccttgttggcaacggtcgtcacctttattccagtttatgtcgcgtcatttttgaccacctttgaaaccttcttagacagtattggaatgttcttaggaccagagattgcgattttcttagtcgattacttctggattagacgccggcactatcaagtagacgcgcttaatacgattgctgggccatactggtatacgaagggctatcatctaacggcattattcagttgggtgattggcgttgtcagttatttaatcttaaatcaattcgcaatcgtgcacgcctatacaggggcaacctttatcgccatgttgatcacagcgcttttttatggggtagctgttcaactacaaactaaaaaagtgatttaaatcgttatgaaagtcagtataaaactattttatactggcttttttattttttaccagatagttcatatatttttcacactttagctttacactgtttctataagggggtgagttaatgtttttcttaaaatcgattccggccaatattcattattattggcggcagtcgctagcgatttatttattggactgtttatttttaggcctggcgacaattattttgggcttgattcggttagaacgacataacttaacccaactcaagagtcagttagctaattttacagctgaagaaaagtttgcagcggatcatccgttaaagacgttgctccattctaaccagacagtcttagagcggtatcaaactgcgtatctattactaatgattgtcgggatcatcgccacagtaatcattagttggttggcgtttaaaattttggcgcgtgatatcgaaaccttttttagtgccaattggacacgaacgaaagtgacgttgtattacggcttaacggcgctttgcttactattttttgctgtcgtaacgatcagccttttgttgttagtcgctaatcagccgttctggcgaggattagaagcgatcaaccattattggcatcgaccactgcaagcaatgcaaaaagcacctaaaacgctcaacccactctttaaaaatcatttgacagattttagtagtcattctcttttgaatccgacactgcacaatagtgtcaaacaaacattaaccaatcaaatttttgggcaattatggcaagcaatcattagcttagccgcaccgattttaatgattggtgggttacaagtcagtcgttttaagaaaaaatatttaagaggtgagtcggtatgttgaataaacaaccattagaagtcgggcagatttatttcagtcaaccagagttgttgaagacagcattacaactccctaatcagccctttacgattgattatgcgcaaccaaagatcctaccgttcttatcggggtgggataatctattgttacctaaggatgctgatcaatcagtcattagcatcttgactgatcaatatgtcaaaaaagtgcggacgacacaaggaagtgcgttgaaaccaatcgatcagttttggattcaatttattcgtggtttagcaaatcggcaacaggtcttcgtcttagcgcgttatttagatcaactagctcctcgagatgcgcgtcagttattaaacgacgtccgcaagattgcggctgataatgaattaattatcatttttacaacggaacaagaatcagtttttgagagttttaaaaaacaagttttaacgcgttaaacatgaaaaagcgtcattccatattcggaatgacgctttttatttgggattattctgatgctgattgactggattctgagctactgctacttgaggtagctgcgctatcttttagtgctttgcttttagggatttcagttaaactagattgatcatccgctaactcaggggcatctgttttaaataatgggactgttgatttgcctttgttttgggaaaggacacttgttgatttagtacctagtttattttcaatctcaacgagttgttgatagccggtttgataattataatcggcaggatcaaccggtttgaaaccagttggtgtgtaaaagcgtaagaggtttttctcgttaactgagtcagaaaggctaagttcatgattgacctgcttttgccattttgcgacttgcttttgcaatttagctgttggttgggtgacttctgtaccatcttgattttgatagatggtgccatcgaggacggtatattctggcgtcacgaagttatgatttcggaaggcgacgacttgatcgtgttgcttggaaagtaagtctgtcccaaattgaacgtaattttggctattgatccctaatagatgcaacatggttggtaaggcatcaatttcgccaccatattgggtttgaataccaccttttaaaccaggcatgtgaatcatgtaaggaacccgttgtaattgggcattatcgttatcggtccaagtgtcataatcacggcctaaaacgccagataaagctttattatcggaatttgagaggccgtaatgatccccatatagcacaatcatcgatttatcatagagaccagaactcttcaaataattgaaaaattcagcgagtgactgatcgagataatgagcggttgcgaagtagttattaacagcggaattttcggttgttgcccgtgggaaatcaccatctgtcttaggaagtgggaatgggaaatggttagtaacggtaataaatttggaatagaacggttgttgtagttgttctaaatatttaatcgattggccaaagaggagtttatctttgagaccgtattgtaagacgttatcaggacttgtattaaaatagctagaatcaaagaaatagttgtaaccaaagtttttataaacgttattccggttccagaacgtcccaacattcccgtggaaaacggcgctggtataatcgccattttgtttaagaattgaaggggctgcttggaaggtgttgtcggaaccaagtgttgtaaagacggaaccctgtggtaagccatacacgccagtttcaagcatgttttctgcatcactggttttaccttggccaacttgattaaagaagttagaaaaggctagcgtattttggttgtgatagagactgtttaaaaatggtgtgacttcttgaccttcaaacttgaaatcgattaagaattgttggaaactctcaagatgaatgacgatcacgtttttacctttagcagcgccgaaataatcggcattgggtgcggcgtagtgttgtttagtgaaatctaagacaggatctaagtcgtaactttcggcttgggcccggacttgattattctgggtggttttaacggcatcgtagacggtaaaagtatcaataccaaggtatttaacaatatagtttcgatcgaaagtccgtgagagaatttgtggccggctgatttcactcagaccaagattaacaccgaataacaaaacggctagggacgtaatactaaatgcccaccttttagggaattggcggtgatcaattttaatgacctttaataggattaaaacggccaagatgataatgtctagccagtagagtgcatcgtgccagttcattagggccagcgaacttttactgaggcccgcggaaacttttgaataaccgaggatcgtgttaattgtcatgtaatcggtgaattgccggtaatagatgacattaaagtacaaaagggccgtgttggccgtgtaaatcaccagcccggtccaataactgataatcggttgcttaatgtagaataaaatccccaagacaagcaaggtagttgcgagcggattgaagattaaaatggccatttggagcggatcgctagctgcgaggttgaaatcggtgaaataaccaaaaagggttttaacccaaaataaaaagactaataggcttaaaaagccaagcttagaggccataaattgttttatttttgtgagtttcaagaaatgtgacatcctttcaaaatcaatctaaagtgcgtcattgactcattttaccgcccaaatgaagacagcgcaaagtgcatgacatgatttaaacggaaacttaaagttttaaagtgtgctgcatgatttgcgtgtaagttggatttgattcatcaggggttaagacatgttggtagacggccgctaattcatggccaattgcggtaatctgtttcgattcagcagtttgataacccgcttcagttaagtcggggacgcgttgttcaacgatatcttgaatcaattgcttaaattgcgtattatcggtacccatgtagcaattttgttgatctttgagccagccgtggtagactggaatatcgcgcaccaagactttttggtgactggcaagggcttctagcacaacgatcccttctgtttcttcataagaagggaaaaagaataaatcagcgttagcataagcaccttcgataatgtcacctttgatataaccggggaagcgcacatttgcaggatggtcctttttaacaatcaggcgaatgttgcgtggaatgctgtacatcggcacatcaccaaaccaaatgaaggtgtattcgggtaattgcttagcaatttcaacaaaatctagcaagcctttacgttggaagaataaaccgacacaaataattaccttttgatcgggcttcaagttgaagtaagctctaaaagcttgttctttatccggcgttgcttgatacttagcaagatcgatcccgtttgaaatcggtgcaatcggtacttgaatgccatacccttgtaaaagcgcctttgaatagagggtaggtgtgatgagatggtcagcctttgaatagagactaaccaagcgatgtttaacaaaaggggcaagttgattggaaccgacaaaggaattacggaaatcctcttcggttgagtgtgcgtggtaaatcacctttttaccagccttgcgcgcctttttaatcattcgccggctatttaaaccgtatgtgttaatatgtaagatatcataatcagtatcgttaggatcgagtgtgtagtcgatgcccatggcagttagcgcacgcttttgatgatctagtgcgcggccgattcctgatttagcgagtagtttttgactttcaaaatacaataaaactttcattaaatggctccttatgtcacgttgtattggtaactaatcacaccattatagcatagctcgttaaatctctcctccaacgctaggcgtatcttgattagaagtttaagattcactttagttagcggggtggcatatgtcatttagtcgtcaaagtgtatataatagacgtatgacgtaatagcttaaatcaatcagataagtggggttatcatttgttatttctaggtggtctttataacaacatcatccttccttgggggacaaaatataatcatctgcccttgattaaattaacggtagagagtttggataagacaattttgtattgttttatttttatcggactgcgtttattgtatttaggccttaaaaaacgtcggattcaatttaagtatgaattgaaactttttatatttgtcttctatttatgtctactattatcgttaacggttttacgccatatttattatccttggcagatgcacctatatgtcaaccgctctctaacccaaattaacttaacgccgtttgtcgagacgtttaagttacggaatgcgccggcacaattagattactggtataacttctatggtaatattctgtggtttgtgccgtttgggtggttgcgtggttcattaacagatcgaaaagggacctggctattaacgattattgaaggcgcactattttcatttgggattgaaaccgcccagtttattttaggaacaggaatggccgatattgatgatttaatcttcaatacacttggcgcgattatcggggtaactttgtacaagggctaccgaattttaaaacattaaattgtgggtgtcaaagacgaatggttggtctttgatacctttttaattacgtcaaaacaataggttaatgggtttactaaaaaagattagcgggtttactaaaaaaaagtaaaaaaaaatcaacctatacgcaaaaaaaaggtaaccgttaacatgattggtgtaatcgttttttcataaacagaccattttggaaggcgcttaatggtgccgttttccctctagaaatcgattgcgtttgtctgtataatggattcttgtactttagagaagaagaggaatttaaaaatggctattttaattgcattaatcccagcacttgcctggggtagtatcggattggtaagtggtaaattaggtggtaacgcttatcaacaaacttttgggatgacgattggtgcgttggtttttggaatcggtacctttttggttattcaacctaaaatcgatttattcatcatggtaatcggtgtcatttccggattattctggagtattggtcaagggcaacaattccaatcaatgcaagcaatgggtgtttcaaaaaccgtcccattatcaacagggatgcaattgattgtaaacactttagcgggcgctttgttattccacgaatggaaaacaacccatgattatatcttcgggattacagcattagtgatcttaatcgctggtgcaacattaacatcaatgaaagatcctaagagtagcttagccgctaaagaagatacacaatttgcacgtggcttccgggccttgattctttcaacaatcggttatggtggttacacaatcattgttaactggtcaggaattagtgcaacaacaatcgtcttaccacaagcgattgggatgtttatcggcgctgctatctttgctggcgttggtattggtaaagcagtctttgataagaaaacaggtttgaacattataacaggtctattatggggcttaggaaacttgttcatgttgatttcaatgtcagatatcggtcttgccatcagttattcactttcacaatgtgggattatcatttcaacaattggtagtatctacctcttgggtgaacgtaaaacgaaaaaagaaatggtgtatgtcacacttggctgtttactagtcattgtcggtggcgtgacacttggaatgatgaaataatcttaatattaattaaaaagcagactgataccttaatgacaggtagtagtctgcttttttgtttaataactgtgctatcaaagtagcgtagttgtttggtggtgttttagctcagcagcatgctatgcttagtttgtgcttcaaacaagagagggttgaaatttgatgcaaacaaaacataaacaggtgatcagctattacggactcagtttcggattgccgttagtattggtcttgatcggctttgccatcatggggttagtgccttttggtaatcacaatttattgtttagtgatttagggacacagtacatgccatttttggctgaattcaagcggcaagtcgctcatcttaacttcagtgcctactcgttttcattatcgctaggtggcaatttagtgccactagcggcctattatctgattagcccgtttaatctattgttacttttaggatcgaatagtcagttaccagttatggtgagttacgtaattgcgcttaaaatttgtacgatgggcgtgacaatgagttattttctgagaacacggacaacgacttatcattatgccgcattgattttttcaacggcttatagtttatgtggctttgtagccatgaatttttataatttgatgtggttagatgcattaatcttagtgccactgattgtcatcggcctcgaacgcttattttcagttaaaaagccgacattttacatcgtgacgttgacgatttcgattctaaccaattattatttgggttacatgacatgcttatttgccgccttatatatgattagccttgtaattaagcaacggcaaccacagcaaaagtgggggcatttattacagcaacaagcacgagttatctggcagtttatttggtcatcactgattgttggtggcttaagcgccattatcctcctcccagcgttgttaggcatgttaaagactggaaaaaagacaattgccatgaccagtttttacccgacaccacaatttggctgggaagtgtttacgcaatttcaggtcggtggtagtcgctatacacaacgattaacgcacgaaccaacactttttgtgggcacattggcattattttttgcggttttatattttatgttgccacaaattcgaaaacaggcgaagtacgctaatggctttttagtgattagtttagcccttagtttttgggtaacaacgtttaatactatttggcatatgtttcagcagccagaagggtttccctaccggaatgcttacttattctcatttgtcttaattaaaattgcctacgaagcaagcctagtacagaggcaaaataaaaaggccaaagggtgggccattgccttagtgagtggtttattggtgattggtcaattgagattacacggtaatcagagttatccgcaagttacagcacaatcatggatattattaagtggctacacaatatttctcgggttattattttattattggggtcaaacaaaccgtcactatcaaaaaatactgataacaggcgttgttttggtatcatttggcgagttagtcactaattttcaattaatgacgcataaaataccattgggttatcaaaaacaatatgcgcaacaatatcaacgccaagctgcactgtatgaacaactcagtgaaaaagataatgatttttatcgggtcaataaccagtcgatcttattaaaatcggcgtatcgcgaaccttattatggctacaacgatgccttgttatttggccaatatacgttaaataattactcatcaactttggacgaacaaatgcgcagtatgctggtggaccttggtttttacagtaagaacgtccggcgaattaatggggtcggacatacagcgattacggatctgttatttgccaatcgctatgatttacaaccaaaaaatcagcaaacggttattcaacgacatcaaacgcttggattgggttttgcggttaatcggcaattagcgcatgttactttgaaaaagcatcggccattcgacaaccaggatcggttgttacaagcaatggtaaatactgaccaagcattttatacaaatcatcgggttaatatggtccatgaagaaattaagacccatagctaccggtatacgctagaaattccaagagatacgcaaggtcctacgtatttatatttaccacatcaaaatttagcgcgaattaaattatttgttaacggacgtaagaagaaaacgccgattagagtgacgagtgctgcaattatcccgcttgaggactcgcataaagggcaaccgctacgattaactgtgattagccctaaacggcagaatattaatcatttccaagttgcgacactcaatcaagaacggtttaatcaagctgtcaaacaacttgatcagcaaaaattaacgacgactgctttatggcaagataacggacatgtcactggcgatattaaaacaatggcatctaatcagctactgtatctcagcattccgtatgatgctggttggcaagctaaggttaacgggcaaatgattaaacctaaaaaggtaatggccaacatgctagcagtgccattaaaacgtggcaccaatcaggtacagttacggtatcgggcaccggggttgctgcttggacaactgattagtttgggcacacttttgatctggttaataatactgatcgggtcacgatggcgaaagcgggtttaattaaataaatgtgaataaatgcactatctttgacaaggtgcctccttgtgatatacgattataataacaataaattttaaagtatagtcaaggaggcgattagaatgttacaaccaacaattcagctatcggcacaagcttatgtgatccaatggaatcggtttttagagcggtttattgtcttcgaaacggtttttagtgaatatgcgcaaactagtaaaaatgttatgcggggtaaaggattggtagatgaaaatttacaattacttaatcactattccagacagaatttaactgtcctcgatcaatttgttgatcaaattgcgcgtattcaaccgccaacggaatttgtcgcattacatgagcaattacagatggttattaagcattatgtgactgctgcaaaggattttgtcaatgcgatgcgattgactgaagagtcggaagtggaacaacaattaaatcaatgtcgaacgattcaaaaacagcaacgactaaaattaaatcaactcttaaatagcattggtgcactaaacagttagtggcgtcatcaaaaaggagggaccgatggtaaaatcggtcccccctttttgattatgattgttttaaattgattggcggcgcgcgtgttcaataaacttaaatttatcagcccggtgaatggattcggtaaattgaattaaggtattatcctgaagatgagtgatacctttaacactaacgaccgcactattaggggcgagttttaaaatggcacactgttcttcggttgcagggataacagtgaattctttattcccataaccaatagttagacccaattcttgttcaaagtagtgataaagtgaatcctgagcgactgcccgtgagatttctgggacaacactggttagaacgtagtcgttatcgataacaattggttcaccatcaacggtccgtaaccgttgaatataggtcgcgggtagaatctctgtggggtctaaatgaaaaggcgcttgtgggacggttgctttttggagttgtaggactgttgtttgcgtgtgcatttcaaagagactatccaattcgcggtaactggtcaagccggaaatgggaaaggcgtatttatcaaaatcaaggactaaagagcctttgcctttgattttatgaatgaagccattttctaaaaggctagcgagtgctttgcggactgtttcgcgtgaggtaccatacgctgttgcgagttcgttttcgctgggtaagaatgagttggctggataaacatggttcgtaattttatggacgagttcgcggtagattatttcatattttttcgacatagactaaacctcaattgtttgattaattccatcatataaattaaatggcgaagttgcaagtgcaatttgaaaacggtttaagaagttcgttgacaacttgtctatacatgttgtatgatgagtccataaacagaaagcgcttttataaaaagaaatcaagggaggatttaatatggcacaaaaagattattcacaactcgcaaaagcaattgttgccggtgtcgggggcaaagaaaatatcgatagtttaattcactgtattacacgacttcggttttatttaaaagatgaatcaaaggcacaaacagaaacgatcaaagctttggatggcgttattaatgttcaaaaagcatctggtcaatatcaagttgtgattgggaatcaggtaacggccgtttatgacgctgtgattgctgaaattggcgcagactttgccgatgaagatgaaacagcccaagtggtcgcaaaaactaaaagaaaacagaacctaacaccatgggggcacgtgaaagaagcttttagtcaattaatcggtgtcatcactggtgcaatgagtcccatcgtcggaatcttggctgccggcgggattttaaaaggtgttttagcaatgttaacgatgccgcaattaggcgcgttagtgagtcaaaagagtgaattctacattattttaagtgcgatgggcgattccgtcttttacttcttaccaatgctagttgggtttacagctgctaagaaattaaaaggcgatccggtcttaacagcggttatcgggggcgttttagtccacccatcattagtcgctttaaacggtaaatcactccttgagattggttcgttaaacttcccaatggtgaactacacgtattcaattttcccaatgattttagcagcctggttggttgctagattaacaaaatgggttaagaattggttaccaggctacttacaaattatctttacaccactaattgtaatcgcagttgttgcagccattacactttatattacaggtccagctattatttggttatcaaacggcttagcatttggtattcagttcttactcttgaagagtggttggttatccggtctattaatcggcggcttctatcaagtgctcgttatcttcgggcttcactgggggattttaccaatcattgctaacgacgtggccacttccgggcacagttatttaaacgctattttaagtacgacaatggttgcgcaaggggctgcggtattagcagttgcgattaaaactcggaaaacagctttaaaagaattatcatttgctggtgcaatttcagctttctgtggggtaacagaacccgctatttatgggattaacttgaaatacaaacgggttttcatctctggtttaatcggttcagcagctggtggctttgtcagcggcttattacatggcaatatgtttggttttgccggttcatggattggatttgcatcattcttagatccaaaacacccagcagatttatcaaacctctggatcttcattgccgcttcagcggttgcgacaattgtgccattcatcgtcacttacgtttggggttataacgaccaaatgcaagaagggcaaggaatggctaaaccacaaaaaccaggtacgactaaaaaagtaacggcataggagagatcgtcatatgaaatggtggcaaaaagcaacagtttatcaaatttatccgcggagttttcaagattcaaatggtgatggtatcggtgatatcaacgggattatccaacgtttagattatttacaagatttggggattgaattaatctggttaacaccgatgtatgtctcaccaggtcgggataatgggtatgatattgcggattattatcaaatcgatccaatttttggtgacttagctgattttgaacggcttttgaaagaggctcatcaacgggggattaaaattatgatggatatggtggtcaaccatacttcagatcaacaccgttggttccaagaaagtttgaagggcaaggacaatccttatcacgattattatttatggcgtgatccagttgatggtcatgaaccgaataactggttatctaagtttagtggtagtgcttgggagtatgtccccgcgctaaatcagtattacttacatttatacgagaagcggatgcctgatttaaactggcgaaatccacaattgcgtgaagaaatctatcaaatgatgcagttttgggctgatttagggattgatggtttacggttagatgtgatcaataacatctcgaaggataaagattttccaaatgatactttcgagacaccgagtgacgatggccgtaacttttataccaacggtccgcacgttcacgaatatattcatgaaatgtatgaacgcgtctttggccctaacaactttgtgacggttggtgaattatcatcaacgccggtttcagaagcaattcgttatacgaacccagaacgtgaagaactctcgatggcatttaccttccaccacgttaaagtcgattatacgggtggtaaaaagtggacgctagggcagtaccgtctgtctgatttgaagcggattttaagtcaatggcaaactgaaatggcagcaggtggtggctggaatgcattattctggtcaaaccacgatcaaccacgggcgatttcacggttcttagacgatggtcagtatcgtgatcaatccgctaagttattggcattagttgaatttgggttacaaggcacaccgtatatttatcaaggggaagaaattgcgatgaagaatgctaatttcacttcgattgatcaatatcaagatgctgaatcgattaacgcatatcaccaaatgttagctgatgggattagtgaagatttggcgattaaaatcctacaacaaaaatcgcgtgaaaattgtcggattccaatgcaatgggatatgactgccaatcacggctttacaactggtatgccttggttgcaaccagttgttgcggatgattattcggtggcgactaaagcacaagcaccagatagtgtctttgccttttaccaacaattagtagcgctacgtaagactgaacctgtccttattgaaggccaatatcaattattggcaccagaagatgaagcggtttatacttatcaacgacagttaggtgataaaaaagtccgtgtgatcgcaaactttacagatcaaacgcaacaacgcgctaacgcggccgttaaagcggtgatgatgagtaattatccagaccaacaattaacgaccgaccaaattacattacgaccatatgaagccgttatgctagaaattgaataaagagaggataagaatgatgtttaaatttatgaaaaaagcacctgcgggccaactaacagcgcccgttacaggtcactatttaccaatcgaacaagtgacagacgaagtatttgctagtaaggcagttggtgatggttttgccatcgtgccggacgaaatgacgaatacgattaatgcgccagttgatggtgtggttagttcaatttttccaacaaaacatgctatcttgattaaaacgaaacaaggtgttgaagtcttgattcatatggggattgatacagttgaattacaaggtgcaccttttgaaatgcaagtggaagctgattttaaagtaaaagctggcgaaccacttgtgacaatcgactgggcacaattaaaagcagctgataaagctaatacaatcatggtcgtcagcagcaatgcgacgtttacaccagccgaaccactaccagcagcagtgacgacggacagtgtcattggacagttcgatttgagcgcagaataaggtgccatatgcaatcaattattgttgaatctgatgattttgggatgaccatcccaatttcacgggcgattatattagctttaaagcggggactgctctcggcaaccaatgcacaagtgacgtcaccagattttgcggcgagtgcggtcttggctcagcaaatggggattcagggaatggggctccatcttgtacttgataaggatgtacccatctgtgacccgcaaaacatcccaagtttggtgacaacagctggccgattgatgtgctatgcgaacttacaagcacgtgaacaagaacttgatatcaatgaggtcagacgtgagtttcaggcccagattgattgctttttagcgagcggtttaaaactgacccatctgacctcacatcattttgtcgccactttaacgcctgccatttatgcggtagtgctcgagttggcccagacctaccaggtgccactgcgtcatgaagtgactaagttaccccttaaacagcaagcagcttatcaagatttgtggcaaaagagcacggttaaaacgacaggtgcattaatcacggcgcaacaagggccatacttaacacccgctgatattcagcaacaattactgttagttgatcaaacagtgccaccagtcattctaagtcatgtcgggtatttatccagtaccttaaggcaaaaaagtagtctaacgactaaccgcttggttgagcttgagacgctaaaaacgttacaagcgatggcttattggcaaagaaataactggcaattgatagattattcggtaataggagtgaatgacaggtgagacattatcaacatttaacggttttaggagatagtatcaccgatcaacgaaaccactatgcgcatcaatggtattaccaatggttggcggactggttagcgattcctaagaccaccaatctcggtatttccggctcaacgattgcccaaccgtacgatccaatggtcaatcgctggcaacagataccaactgaaacagatttattattaatctatgctggtatcaatgattttggtcgcgatgtcccgttaggccaacttggcgaccaaacgaccgtgactttttacggcgcgttgcagcaaatgcttggccagattagtaaacattatccgcaagcaacgatttattttatatcgcatgtcaaaattggaacggattttttcccagccatcaatcaaagtggttatcgacaagccgattacgaaaaggcaattgatcaagtcactgaattattaggaattgcgcatatcagtctctttaatcaaaaggcattatcttttgccgatgcgcaacaagcagaagctcttagtctcgatagcttgcatcccaatgatgccggtcatgaaaaaatcgcacggtttctgataaataaaattaatcattaaaaaaagccttggcacaaaaattattttgtcccgaggcttttttagttatttaaatttagaaaagttggccgatgccgtagtgaatagccatggtgactaggccgattagaatgttccgaataatcgaaactttgaccttgccgtcaccaagtttagcactgatataagctgtaatggaaaccgccacagtaacggcgatgatggtccccgtcattttgtaggcttcagggagaataatcatagcaaataatgggaaaacaccaccgaaggctgcggagaaaagagaagcaaaggctgctgcccaagaattcatataatggccgagttctaaatcgtatttaacgttgacgatggtcgctaaaggttttttcgacatgagatctttggcaatcgctagtgaggtttctggtgtaacgccttttgattcgtagaaggcttgcacttctttgatttggccttccttatcatgaattaagcgttgctgttcaatggcaacggcagccttttcagtgtcactttgagaactaacggaggcatattcgccagcggccattgaaaaggcacaggctagtaggtctgctaagccagcgataaaaatcgtgaaattattagttgtggcggcggcaacactaaaaagtacgccaacgacggttaaaatcccgtcattggaacctaaaacaccagcccgtaaggtattcatcttttcttccattgtttggtggggcttttcaattgaaggggtagttgtttttgaaatcgacatagaaaaggatcctttcgaggaaaaataattgtgctttttaaaaattagttagcagggttttattgtttgaacaatgtcccgattgcgtaagtgacaatcattgttaataaaccggagacgacgtttcgaataatggctttggaacgattagctttgccaagggcagcggcgctataaccagtaatagctagggcaatcatcaccgcgatgatagttgcgataacgctaatgcgattagggaaaagggtaattgctgctagtggcaaaatagaaccgataggaaatgaaataaatgaagcaatcgcagctgcataaggatttgtgaaggcgttaggtaaaaagccgtatttttcccggataacagttgttagtgggtcagcagtcatcatttcttgggtggctttagtcgctaattccggtgcgatacccgttttaatgtatttttgacggacaaaagcgctttgagattcataattactttttagattgagttgtgtgttgaaaatggccatttcttgcgcatctttttgtgtgctgacagagacgtattcgcccatcgccatcgagatggtgccggctaacatgccggcaatccctgagataaagatggcgaagtgatcgctagtggcaccggcaaccccaataacaataccagcaacggaaagaatcccgtcgttggcgcccatcacactggctcgcatgacgttaattttttgagcaagagataattttttagtcacagtaaagcctccaataacctttattactttataaccattataaactacgatttgtaatacttcaaccgattacttttaaattgcgcaaaattgaaatattttttaaattaaagcttgccttatagtccactagaaggtgtattctacagttactgaagtgaaggagtgacgatcatgagcaaaatattagtattgggtgcggcaggccaagtcgcacagctggttattcaagatttattagcagctaagcaacacgaattagttttatatctgcggaatgctgaacgattggcagctttaaaaacaaatccgcatgtgacgattatcgaaggcgatgttttggatcaagcgcgattaacggcagctttgaaggggatcgatatcgtttatgctaatttaggtggcgaatttgaacctttaatgaagaccgtcgtcaaagcaatgacagcgaccggtgttaaacggttgatttatatcagtgggctaggtctttatcatgaagtgccgggagaatttggtgcgtggaatgaacgtgctgtgggtcacgatgtcatggaagatacgcgcagagcagcagcagttgttgaacaatcgccattagactacacgattttacggtgtgcttatatgaccgacgaaccgattgttgattatgaattaacggaaaaagggacaccatttaaagggacgatcatttcacgacagagtatcgccaaggtggtggtagacctaattgatcaaccaacccttggtattcgcgcaagttggggattaatcagcctaatacggacggtgatcgaccgatttattaaaaggaggcggttagcttggcagaaaaacattataagattggtgaatttgcaacgctagtaggattatcaacgtatacgttgcgctattacgaggaacaaggtttaatcaaaccacaacgggatgcagccgggttacgctattacacgttagaggatgttaaatgggtcggttttatcctccatctaaaagggaaggggatgcggattaccgaattacagaactatgttgaattgcgagcgcaaggtgatccaacgattgaggcgcgcaaggcgctattgcagcaggttaaagcacgcgctgaagccgaagtcgctgagctacaagcgaacttggtgataatgggccgtaaaatagactggtatgatggcaaattagaccagtcgataggtcaattagaaagctttgaaacctatttacagcgattcgaatcataataaagtgaggttattgaaatggttaaaaatgaatgattaaaaacagaacaattatttacagtaggggaaccgaatgtggcttaccaagatttttttgttgggcaaagctatttatcaatgttggttaacgaaccagatgtgaatgctaatgttggcaatgtcacgtttgaaccaggttgtcgcaataactggcacattcatcatgatggttatcaaattttgttagtcactggtggtgaaggctggtaccaagaagccgggaaagcagcacaacatttggtgccgggtgatgtgattgtcactaaagacgggattaaacattggcatggtgccactaaggacagttggtttagccacatcgcaatcacagctggaacacctgaatggctagaggctgtttctgatgctgattatgacgtattaacaaattaaaaggaggttttaaaatggcaaaaaaacaaacggcaggtcgcgatttattaggtgattttgcacctaagttcgctgaattaaatgatgatgttttatttggacaagtctggtcacgagaagcagaactactagcgcatcaacggagtttaattacaattagtgcattaatttctggtggtaatttcgaacagttaccagcacatctaaaaattggcaaggaaaacggcattaccgaggcagaaattgtcgaagttatcacgcacctggccttttatgtgggttggccaaaagcttggtcggcaatgaacgccgctaaaacaatttaccgggcttaaaaagtatttaaaaagtgtcgttcaaattaaattgagcgacactttttttgagcgaattgataaggtggacaactatctttttttaattggactagttcagcgcttgcattggcgtactaccaagcattctaaaaattacgatttgagagctaccatattttgaattaaatacaagagtttaaatttaaaaagtctgcgtgtactatatatagtgttgttaattctttaaaggcaccaagatatagaaaatggtgttggcgatctgaataaataactaatttgatataaagagggtttttgatcaatgcaagatagtcgtgcaatcgccagtgtatttaatccaaagtggtatatccaacaaatgaagggttggacaacagccagttatggcttattaatgtttggcttgggttttattttagctgccacagtttcaggtggaccaattaacagtgtttcaatcttaacgatgtttgcgggcatgttaggttttacatgtacgattagtatcactaataccaaacccttaaatggtgtttttgggattatttctgcgttaatctacattattgtggcttacaacgctaaaaactataatgatatgttattacaaacagtctacattattatgttagatattccggtcttattgatgccagattgggcacaaaatgtcgataaaaaggtccgtggtcttgcgagtcgcggtaagggtcttcgtaactgggtactgacgttattattcttcgctgcttcagtagggttgttatatctctgggaaagtaatatgacagatagcccacggccgttgattgatagtgttgccgcttcggttggctttactggtgcgttattgacaacgttacgttttaaagaaagttactacttctggtttattcaaagtattgtttcgattacgttatggggcatcacagcgatgcaaggcggttcaaactgggtactcttctttacctacatcttgtacttatcaaacgatttagtgtcatttttcgataagaacgttgtttggttccatcccaaagaaacgattgctgaaaattaaagtatcaaaaaagcatcctaatatgtgttaggatgctttttaatttgaaaatattagagtttaacgccattttctgcgaataattctggcaatgttttaagtgattgaccatcatattcagcgaagaaatcagcaacgctgtattctttgccggtaggacgagaagcatcatagcttgcgctaattgattctgtaagcttgccatctttgatggttaattctaattcttcaacagggatactacgtttgtcagtaatcttagcatcgattaagaatgggcgacccgcttttgtgacttcaagagctttgtcaaaagcggcaggtaattctttagaagaacgaacggtgattgattcaacgcccattgcttgggcaatcatcgcgaagtcttgatcttcgataaagattcctgaataatccattggtaaatcatcttgttcactcttaatgaagtttaatgaagcattagaagtgatgatattgatgattggtaattgatatttcttttcggtgattaaatcttgcatcaccattgaaaaggcaccatcaccagcaatattgaagacttgacgatctgggtagctgagttgaccagctaaggcaccaggcacgcctgagcccattgaagcaaagagggctgaaattacccatttattcttcggtgttaagtgcaagtggcggaaactattgatgatattatcaccaacatcaattgaaaagacagcatctgggtcagcaatccgattgatttctttatagattggttcaaattcaagtggatcagatggccgatttgttaaggcatcaagataagcttgccagttcttcatatcagcaacggcagccttgaagaatggacttggtgcagcagcttgactacgggcaaccactttttcaacaaaagtagttgcatctgaccagataccaaaatctaagaaatggtgacggccaaattgtgcttcgtcattatcgatttgaacgaatttaaagtcgtgtgtccggtaaattaagttagcaaatgggaagtcggcaccgatggcaatcacaagatcactaacggccatgatttcatcggcagcttttgaagcagctcggttagccatgcctaagttaccttcataactatcaggtactaagccttttgcaagaccagtcatgacgattggaatttgtaatttcttcgataattcaacgagtttgtcgccgccatctttaattccacgaccgacgtggatcacaggacgtttggcatctttgaccattgctaagaattggtcaacttcttcatcagtagcaacaggacctgcaacttgtttacgatctgttggtgagcttgagctgtatggtgtgtctggaatttcaacgtaaccaaagttattaggaataatgacaactgcaacacccttgtgtttgtatgcttcacgaatagccttatcaacaacatatggtaagctttctggcgtcataacgagtcggttataaacggaaacgtcatcaaacattggattttcattaaattcttggaagtagttgtagttcatatttgtacttgggacttggccaactaatgctaaaacaggggcgtgatcttctttagcatcgtataagcctgtcaaaagattcgttgcaccgggaccagcagaaccaaaagcaaccccaattttacccgttaatttagcatcagcagcggcagcaagtgcaccaacttgttcatgacgtacttggatatatttaagtcggtcttgttcaaccgttaatgcacgcattgttgaattaaatgagccaccaggataaccaaaaacatggtcaactccccaagattcaagaacgcgaagcattgcaacgcttgctggaatagttttttgcgtttcagtatttgtaccagtcatagtaaaagaactcctttaagtgaattaacgatttaggttgcgcacaaccttatgacatataatttagcacacgttgaaatcgattacaagcgtttcgcttcttttatcaacggactgaactaattactggtattgtgacaaaataaaataacaagtatcccatattctgaacatgattcagaactaggaacgcttgttattttttaggcattaagataattaaggagtttttccgttgttagttgttgtttttccaccgcattaaaatcagcaattaattgaccggcttttaacactaaaagacggttgccataacgcaaggcatcttccaaatcatgagtaatcatcaaacaggtgagttgattatcctgaatggtttgatctgtaaaagccatcagtgcctggcttgaaacggcatctagggcagatgtatgttcatctaatagtagcaattcaggtttttgaatagttgccatcaagaagttaagggtttgacgttgtccaccagataaggcgctgaccggtcggttaagctgttgctctagatgattgggtaaggttttggcgagagccttaatttgcggtaattgttgttttagacgacggggcaacaaacgacgccgctgaccacgacgcatggctaataggatgttttcggcgacggtcatatcagcggctgtccctaatttaggatcttgataaacacgactaattaaacgtgtccgctgttgggcagattgcttggtaatctcttgcccattaaaaataatttggccactcgtcggcgttaaatcaccagcaacagtgttgaaaaaagttgatttaccagcaccgttggctcctagtagcacaacgaattctccgggattgatgtcaaggcttaactggtcgagtaattgtttttggtcattatcatcagatatttgataacttatttggtttaaagtcatacgaggcgtcattttgtggtcattcctttcttttgttgtggtgcaatgatgaagatggcgaggataatggctgagaacagtttgaaatcattagcattaaagccaagttggaggaccaatagtaagattaaacggtagacgatgcttccgaggatgatgctgattaatttagaaatgaagtggtgaccgactaatagccgttcaccaatgatgatggcggataagccaatgaccattacgccaatccccatattgacgtctgcaaagccgttatattgcgcaaccaagccccctactaaagcgatgagaccattggaaaggacgattccaatcgttttagttcgtttgacggcaattccttgagagagcgccattgtcggattatcaccggctgcaatcagtgcttgtccgaattcagtgtagagtaataaggcaagggccaacatcgccacgacaataatgatgaggttcaaaattagtagccgttgatcgacagtgaattgttgtaaaaaaggcaattggtagagattatgttgatcaccgattgcgaggttggcttggcctaaaatacgcaagttaactgaataaagaccggttagcgtcaagataccggctaagaggctctgaacgtgaaaataattgtataagatagcagtgactaacccggcaagacaaccgccaacaaaggcaacgagtagcgaaagggcgatattgtgttgttgtagcatgacggcacttaatgccgcgcctagtgggaagctaccttcgacagtcatatcaggaaattttaagatccggaaggtaatgaagacccctaaactaagtaaactccataataatccttggtcgatggttgaaataatgaggctcatttgataatcgctcctttttctttagcggttttgacaagattttgaggaatggtgatgtgtaagtctttggcctttttgagatttaagacaaggtggcctttacgtaaatagcgaatgggtgttgaagcgggttttgaacgaccgcttaaaacggcagcggccattttgccggtttcaacgcccaaatcatattgactcaagccaacggtggcaagcccgccgtctttaaccatcgtttcagctgaaggaaagaccggtgttttagttttatcggtgacgtggacaagtgtgcccattgcactggcaattgtgttatcggtcggtacgtaaattgcgtcaactttaggcgctagattttggctgacctgttcaagatcgttgacggaactaaggctggcctcaacgacttggagacctttttgttcagcgagttgtttgaataaatgcatttgactggttgccgagttatcactgctggaatataagataccaacggttttaagctgcggcatgatggcttgcattaaatcgagttgtttttgaatgggtgcttggtcggaaacgccggtgatattggcgccgggatgttggttatttttaacgaggtttgcacttgccggatcggtgatggcgcctaggataattggcagttgtttagtggcgttagcaaggctttgggcggctggtgttgcaatgccgatggtaacttttgccttttctgtaacaaagcggttgctcattaggcgcaagttactttgatcgttttgtgcgttttgaaaatcaattttaatattttgatgattatgatagccggcactcgctaaacctgcgacaataccgcggtggatttcgtcaagtgcgggatgggataagggctgtaaaataccaacggttggcaaatcaggttggtgggcttctttaatttttttgatacctagcagtgtgagtaaactaccgaaaattaaaatgagtggtaaaaaacgttttagtttagacattgacgaaagctcctttaacgtgcttttcagcccatacttctgcggttaggtacgtcccgcaaacgaacgattacatcgttcattcactggactaggctactcctcaaagtataaccaggctgaacgcacttatttctcaaataaaaaaagtcccccacatagtcatgtaggggacagaaaaagcctacatggatttcctcgagtaaaatccatgtaggcttaaaattcaatcgattactgatgaatggccgcatggatacaatcaaaagactgtatcccacgacggtatacaatctcacttagcggctttgccaacgaatattcaattgtactaagtgagtgtttgtcattttcagtaacctccgttttatttgatgttgaaaagtatagcggcttgccagaatgaagtcaaggcctttaagaaaataaattctgaaaagaaagcaaaacttgcgtgaaaaagccagtgagcagtatttttgacactgagttgtttaagatagtacgtttgtattggtagaaataaaacaaacaggagatgaaataatgaaacaagtaccagaaacaaaaatcaaactaacggatgtaaaggagttgattaataaagggtataaccttttaggtgagcttcgtgaagaagcagatgctccagtagcaaaagcagaatttctgacagaagaaattacaaccgtttatggagaagaagcagcgcgtaaattttataatcctgaaaacttcaagcgggaagggtctatgccaaaagtagtattgaaaactttatttggtgaagacggcgtacagacgatagatggaaagaaacaccatcaacgtaaaaattatttcatggatttgatgactccagaacgtatggaagactatagagctattctagatcaaaatcttgcaaccgaactcgatcagcaacatggcacttttgagttattcgacctttctaaaagagttctctttaactctatttgtgaatgggctggaattaatctagcacagtatgatccgaaagaaatcgataagcttgctagtaatcaaatatccatgattagcggagccatcacttctccaacgaaccacttaaaaggagtaaaagaccgtaacgaatcagagggatgggctcaatcattaattaaagaagctcgcaaaaatcctgtaccaggcaaagaaaaccttgccctctatacattcgcacaagcagaagacctagaaggagagttattaccagtagaggttgcagcagttgaattgctaaacatcattcgtcctactgtagcactgacggtttggatggccttaatggggcatgcgcttttcagtaaaacgaacttgtatgaccaattaaaagaagactttgataccctacaagattcctttattcaagaaatgcgtcgctactatccattctttcctatgttaccagcaatcgctcttcgtgatgtagaaattgatggttacgaaataccaaaagatagctgggttgtcttagatatttatggtacaaaccatgacgctcgtacgattgatcatccagaaaaatttgatatcaagagatatattggaaaaacaaaagaaatttcttatgaagaagaatacgaaatgattgcgcaaggtggaggagaatttagaaatatgcaccgttgtgcaggagaatggattactcttcacagtatgcgtgtcttttctgaccaattagtaaataaatataactttagtattcccgaacaagactggaccgttccaatgaaccaatttcctacgtatccaaatagtaaagcattgttgtttaaagaataatttaaaaataaaagtttggtagagagctcccgataaaatggtatccatgtcaaggacacaataaaaaaagagattaagctgcttgaagatgcctcctatattgaataggggtcatcttttttaaattccattgataacggtaattgttagagtaacgtaagcgcctaatagaaaggtacctagaaaatgaaaaagaggctggctcactgggtctatactaatatccttccagaatactccatataaaacagttcattttttaagcgtccaaaaagaacctatacaccactgccttaactggtttctattcaatagcccagcattcggactttcccagaataatcttgttcatattcaagataatgaaaaaccgccatctgttattcttttaaaataagtttcttttagaagggatgatttttccatctaaagctaacgtttgcccaaatccatccagtgtttcatataaagtagtgaccaattcagtaaacatctcatctaataggtgttgatggagcagtaacttttttaaaaatcgagaaaaagcagcttctgtgggagctagttgaaccatatacttgcctttttgtgagcgcgaaaaatgaggtgaaatccgcatagttctctgagttggctattccgcttcaactctcgaatcaaagaagcgacagagcgatgttgaaagacaaaactagctacgaaagcacgccacatggtatgaactggataatcatttctgccctttccacgttcttcttctaatgcagttaacagattttcacccggtaatgccgttaatacatcattcaacttttctaaatcaagggggcaatctagcttgcattttacctttaaaaaagctaaagttattaagtatacttgtgttttaaaaacaggaggaatagactactatggcacatatttcatttgatgcatcacgtttggacaaatttgttcaatcaaacgaacttgcagaaatgcaagcaatggttaatgctgcagattcacaattacgtgaaggaactggcgcaggcaacgatttccgtggcttcttagatttaccagttaattacgataaagatgaatttgcacggattaaagaagctgctgctaagattaagagcgattcagaaatcttcgtggcaattggtatcggtggttcatacctcggcgctaaagctgcaattgatttcttaaacaacacgttctacaacatgttaccagcagaacaacgcgatttcccacaagttttattcgctgggaactcaattagttcaagctacttatcagacttagttaacttgatcggtgaccgcgatttctcaatcaacgttatctcaaaatcagggacaacaacggaaccttcaattgctttccgtgtcttaaaagataagttaatcaagaaatatggtaaagaagaagctaaaggccggatctacgcaacaactgaccgcgctaaaggtgctttgaagactgaatcagatgcagaaggctatgcagaatttgttgtgcctgatgatatcggtggtcgtttctcagtattaacagctgttggtttattaccaattgccgttgctggtggcgatattgatcaattaatgaagggtgccgctgacgcacgcttagaatatacagatacagacgttactaagaatgatgcatacaaatatgctgcattacgtaacatcttataccgtaagggttacacaactgaattattagaaaactacgaaccaacattgcaatacttctcagaatggtggaagcaattgatgggcgaatctgaaggtaaagaccaaaaagggatctatccttcaagcgctaacttctcaactgacttacattcattaggtcaatacatccaagaaggtcgtcgtaacttgatggaaactgttgttaacgttgaaaaacctaacagcgacattgacatcccagctgacgaacaaaacttagatggtttaggttacttagaaggccatacaatggacttcgttaacaagaaagcttaccaaggtgttgttttagcacatactgatggtggcgtacctgttatgaccgttaatattcctgaccaaacagcttatacattaggctacatgatttacttcttcgaaatggcagtttcaatttcaggttacttgaacggcattaacccattcaaccaacctggtgttgaagcttacaagaagaacatgtttgctttattaggcaaacctggcttcgaagaacttggtaaagaattaaacgaacgcctataattgatagtatttcgttttaaagaaagcgactaaaattaatttttagtcgcttttttagtgtataaaaaaagagtcaggccaaattgatgcttgacccgactttaatttatctatattattcaaatgtcatttcattgactgattcttcaaggccttctaggacctcattttgttcgatgaaatcaacccaagtttgatagtcatcagcatgttcaccccgaatgttaaaggccatcttttgttggatactagcaataaattcggcaaccatcttatcgacggcgcgatcaatcttagcttcattccaacgtttagcgggttggcgtttcatatttttttcattttgataatcgagacttttatcgcgaaaggtatcgagggcacgcgagtttgcttcgagatactctaataaagctgcattattcattgaattctccttgaaatgtatttaataggcggctaacaacgattttaattcctgttgtgcggccgtatcttgtgaaacggtaaatggggtgggcgtggtatttctactaccgctaaatggtgctaatgcaaagccatcttccgtgttggtagtttgaccgttacccgttttaagttcgtaaacgacaccgttatcgcctaataaatatttactaattgggcggctcatgtccatattgctagcatagtttctggcgtaggaatcgtataattgtgaatcgataccagtcgtgccatctaacgctgtataaaagatgcaaccaccaactgcttgaatggggtagtggcgaccatcaccttcaccgtgttgaactaaaattcggccatccggtgtttcggcgtaccaatcaccaggatcgtcagcaccatggtcaaagtaccagtcactaacagccatattaccaacttcagcgcgttgaccggcccaatttaagaaatcatgagtaatcgctgctttttgactatcggtataggaatgggtggtttcttgaaccgcctgactagttgttgatgaggatgttgttgttttggagactatttttgaggaagccgtttcggattgtgaagctggttgttgagatgaagatgatgctgagttagtactagcttgttttgcttggcaagctgttaataataagagactagtacctaataatagtgtgagtgtttggtgcttaaacatgataaatcctcccaattaaacttaataggtcattgcccggtggccttggtaacttgcaatcttccagaaggccttaaatgtcatttttttgcgtttccctgtgtaaggatcattaaaatagaagtgctcttggtcataaccgacgattaaaacggaatgagcaggttgcccgtgataattaatccacgcgacgattggttttttatgatcaagtgtcttttttaaggtcgatacggatgcattagaaagatcggtgaagctgcctagatattgatcgaataaatcggcccaagcaggtgggtacatggtataaccggaatcatcaaatgggttaccccaaaaaccggtctccatatcgccagtggttgtgtagggaatcaattctgggatagctgttttgggtaagtcgatatctttataagtcatcagcattgcgacggccgtgatttcgcagccagttggtaattctggaaattgagaaatgggtgcgatatctaacaggacttttttaggttttttagtgatatcttgtgcggattgggcattttgtatttttaataggggcttaccaaactgcgcttggaccatcaacaggccaatgccagccatcagtagtatccctaataatcttagacggtgcttcttttttagtttcaataatcagtactccttgctatagatgatagtggctggcgagtagttcaaagccagttatcagcaaactgatacacagaacttgccaccacatttgtgtgagaagggctagtaggatgagcccgccgcccattaaaaggacgggtaaattccaagtgtgcttggtccagaaaataagggccgtactaataaaaatttcgcaaacaactaataagacagcaatcataaaaaagcctcgcttccaatattataaagacttcttatatagcagtataccattttgtatgggggacaaccattgatgagcgcaaaagtaaagcgcctagtgctaaacaaaattttgtttaagactagacgcttattaattatttgaaaaaggccatcaagaggtgattaatttgatcgaaccaggtggtaggatgcactaatgtcgttaagatttgttttcgatgtttgtgccaggcggccttaagatgttgatccgaaagtttagtaatatcaaatgccacacataacactccttacttgaaatatagttgttaagaggggatttagccttcattatataacaattattaacattagcaagggtgttattaacaatcaataatcaattatcgtcggccaatggtgcgtaaaaaagagtactttgttaatagaattggtcaataacaatgcttgataaatgttaaatacgaatgaaacggtcttgggggcgctttaacgagtatgacaatctttaccgaattttaaagcctcgttcgccttatttaaccaacaagacatttgtggtcgaatgaatactgataaattgggccactgaaccaatgagcaatcgttcaatagcacctttaccactaaccccgacaatggttaaatcaatatcggcttcttgtgggatagtgatggctaattcacggcggggtgaaccaaccttgaaaatggtttggacgtctgcaacgccttgatccttggcttccttggctttttcttctaagtagagcttcgttgattttcgttcggcctctagagaagaagagggatatgtgatgcttgtgctgacagagacttcatctggaataatctgagcaataaaaagtttggcatgattacgtttagccacttcgatcgcttgtttaagcgccttatcagctaattctgaaccgtctaatccaactaaaatattatgatattctaacatgataaaaacctccttcttaataacttaaatataacataatggattagttttttctgctaatttgatttggtggtattaagttgtgcttgaccgatcgtttacgtaattatggcgatgggttatactgaacttatgaataatttctcccgaaattaaaaactacttatataatttaattaaataaaaaagacctgaagattgtcagcttcaggtcttttttattgccctattcaacgtgcgtaatggcaagttgtgtcattttatgtttctgattagttgttgtaatgattgaatagcgaatctttttagttgttaattgtaaaagtttattgggacggttgaaggactgctttacaagcgttgtaacttgcttgttgtcggtgcccaggctagcggtgaaagattccaaatagtttttaaagacaaggttgttcttcgcatctagcgatttaacggaaattcctaagatttgtccatcactagcattgatagagataacattatgatcatcaatttgatccgagcgaataccttcaatcgctttagcatcaaaaacgcctaaatttttttggcgtgctaaaggattgtaacgtgcgatgaaagtagaccattttgtaataggtgttgcagcaggaccttgcaagtatgttggattattaagctgttcgttatcggcaaatgtgacacgatattctttggctttgtagggaatatcaacttcaaaagtcccatcagtcactttgactgaatgggtttgatcgccaatttgccagtacacccatttttgcttggttttaccggtcacggttgcattgaacccgctcccattttcatgaagcttaaccgctacggggtttccgcaggcggtaagtagtaaaagaagacttgctaataaactaactagtgttattcgacgcatttttttaccctccaaaatgtaacggggttaaccatagtttcaaaaataaaatgctccccagcattttatttgaatggcgtaaactgttggcacctaattgaaaaatgatattttagtttcgctaattaatagcggttgaacgggcattttttaactgatcaatcgcacggacatgacttttatttgttttatagatatcatctgcgtaatcttgatacgtactgttaggacgcgttgcagctaagataaaagcattagtctttgccaaaacgtttttagcgtagacaagccgttctttgttatgacttgtcttatagtctttcatgctttcataatcagtttgggcaatagcgtaataattatcagcatcatcgagcttgcccttagcaactagacgacgcccttcaccagcgattgcattttcgttatcagtataagttgaatcaccgattgtaacggaaccgtctttaatcagtgtttcccaagtagcagtgtatttttgggcaacatattctgtggaagctgttgcttgcttgatatgttttaaaaattgacgttcatgtttattaaagcttttctcacgtttttcaagtttaacttgtgcttcatgcgcggctttttgggagaggtagtattgataaccaaccggtgcggccgcaacaagcaacccgattaaggcaataatcaacgcggctttaatgctttttttaaagataagaaggaacaagagtagtaataagcccaatccaaagatggctaagccgaaatagagaataacggctaacattaagttcataaagtgacctccaattagataatcagcgttaccatggttaaccaatgaatattatcccattttacacaatttaagcaagttatttttaatagaataatgtgaaaaaaggacaaattttttcataaaagggctttaattagaaaagctaattgtttttctgaaaattatcacgtatcatgtgatatatacttatgttaacattaggaggaaatagtagtggatgcttctttgacaacccgtttggctgccgaatttattggaactgcaattatgattatttttggtaacggggcagtagccaacgttgaattaaagggaacaaaaggttttagtagtgattggttcttaatcgcttttggatatggatgtggggttatgattcccgctgttatgtttggtagcatttctggtaatcatcttaatccagctgtgacattgagttttgcagtgatgggcttattcccatgggaaaatgtcttaccatatatcattgttcaattcttaggcgcaatggttggtcaattattattggttgcagcttacaaaccatattatgatcgtacaacaaaccaagaaggtattttaggctcattcgttacaattgatgctgctcatagccgtatgaatggttttgtaaatgaattccttgggacacttatcttagttttcggtgctttagcaattggtgctggtaagtttggcgctgccggacacatcgttgttggtttattagttatgacattggttgcttcattaggtggcccaactggtcctgctttgaacccagctcgtgatttaggcccacgtttggtgcacatgttgacaccacttaagaacaaaggtgactcacaatggagttatgcttgggtaccagtcgttgcaccaattattggcgcaatctgtggtgcaggaatctatcaaattatttttgcataatgatcaaaatagtccgcgagggctattttttttgcacaaaaatacccggcttaaactctaattggggaagagagtgagccgggtatcttatgagtatcgaaatgatcttacttgggggagtattaatcattcttgctaaaatatatcataaataccactaaaattaaagcaaattacgcataaaacataaaaaatgtataaaaaataatgataaatggtaaaataagtcaatgacagcgattgcaaacccgcctgattagcgattagttatttagtgaaacttaaaacaaggcatgctacaataaagttataacaaatgatgccgattacattttaaaggagaagagtcaatgatcaaatttccggaatattttatgtggggcgcagccacgtcagcaccccaatcagaaggctatgcgcttaattatggtaagtcggcctcaacatgggacaaatggtttgaaatgcaccctgagaagtttaatggcgaccagggccccgattcagccagtgacacttaccgattgtacaaagaagacgttcaaaatatgcaaaagattggtttgaattcattcaggacctcaattgcttggacccgcctaatgccagacggggaacatgttaatccggaagcggtcgctttttaccgagattattttgaacgtttgaaggctgctaatattacaccaatcatcaatttattccattttgacatgccttggtggttaatggaaaagggtggatgggaaaaccgagaatcagtaacggcctttgcgcgatatgccaaaacagcatttgaattatttggtgatttggtggaccgttggacgacttttaatgaaccaatcgttcatattgaatgtggttatttaacgggttaccattatccagacatcattgatttcaagaaggcagttcaagttggctaccatactttgttggcgcacgctgcggcggttgctgaatttagaaaagtaaaaccagacggtcaaattggaattattctcaatattacaccagcttatgcgaagagtgatgcgccagcagacttggcagctaaagaaaaagcggatttacttttggctaagagtttcttagaaccaacagttttaggccaggtgccacctgctttgataacgttgttggcggaacaccaattgacgcctgttactgaagtcggtgaccgagatttattagcggctaaccgtgttgatttcattggtgttaattattaccaaccattgcgagtacaggcaccaaccaatccacacttcccggcgttgacgaccgatgacctctatgagaattacgtctggccagaacggcgaattaatccatatcgtggctgggaaatctatccagaagccttgtatgatgttgcgatgatgatgaagaacgactaccagaatattccatggtatgtttctgaaaacggcatgggtgtcgcagatgaagaacggtttatggctgcagacggtgagattcaagatgactatcggattgaatttatgcaggaacatttacgccaattacaccgagcgattgcagatggtagtagttgctttggctaccatacttggacgtttaatgattgttggtcttggttaaacgggtttagaaatcgctatggtttcttccgggttgatctggagcataatgcacaacggactatgaagaaaagtggtcattggtatcgtcaattaacggaaaataatgggttctaattaaaaaaatgtctcgctagaccaagaatagtttagcgagacattttttaattaataaattttagttgcaacgtatttagtttgaagcgcgttaaagtcgtaagttgccagattagtaagatctgcatcgccgttgaagacagctgtcgcactaccggataacattaagttaatcggtaaatcatctttataacgtgctaaaacaacgggtttgttatgggcaaaagcataaccgcattcccacatcgttcctgagtcgggttcaaattgacctgattctgtttgatagtctaatactgctacaacgagatcagcttgatcaatttggcgaatatcaaatccgaaagtagcggtttgccattcaaaactaccaaattcagcttctgaatagctatgttgattggggcggaaaatactttcggtctcaactgttggattttgcgctaggagggccgcaaccttgtcgagtctttcgatttgttcaggactaaaaaaaggacctgcgagatagatttttttgttggtagacataagagccgcctttctggataatgttcgtgttttagataagcagttaagcttaaaagagtgaactacttcattatagacggtaaataaaaaacattcaatcaaaaaaaggttgcttcagcaaccttttttgatttaacgctgtttaagaaaaatggctagcgcaattaaaattaccgcaacaacgacaaacagataaatagaagatgtcccaactgcttttttacgttccttagcaagggggcgattagctagctttttatactgtttcttagcgatttcgagtttcttttgatctttatctttcatattaatgtacctcttttatttcagtgtatctattatagcatgaaacaccatctttaataaagttggagactaacaactagaaattatagatataactagacattccgcctagaacaagctacgataatgctaatatctaagtaaaggaagtaagaagatgaaattggcaacagaaaagaaaacaacccggcaaaaattgtcaatcgctggcatgttaattacgatgggcgttgtctatggcgatattgggacatcaccattgtacgtgatgaagtccattgtcgagggcaatggcggtattcgtaatattagtcaggattttgtggtggggagcatctcacttgttttctggacattgatgttaatgacaacggttaaatatgtattaatcgcgctgcgcgccgataacaacggtgaaggtggtatttttgcattgtatacgttaattcgtaaacaagctaagtggctcgtgataccagcgattattggcggggcgacgttattagctgacgggatgttgacgccagctgtgacggtcacaactgcgattgaaggactgaagggattgccgattaatggcaatgttttggtttccaaccaacgtgaagtgattattttaactgtcacaattttatcagtactcttttttattcagaagttcggaaccgatttgattggtaaatcattcgggccaattatgttgatttggtttacatttattggtgcgattggcgttatgaatttaatgggggatttaacaatgcttaaagcattgaatccttactacgcaattcatctcctatttagtcctgaaaataaggttgggattctaatattaggtagtgtcttcttggcaaccactggtgccgaagcgctctattctgacatgggtcacgttggccggcataatatctatggtagctggccttatattgccgcttgtttggtccttaattattttggacagggtgtttggttattacagcacaaagaagttgccgcttatcaaaatatgacagatttcaatccattctttgaagcaatgccggcacaattgaaaattccagcgattcttttagcgacagtggccgcaattattgcgtcgcaagctctaatttctggatcctatacgttagtttctgaagcgattaagttacggttattgccacggattaaagttgattatcccgctaaattaaaagggcaactctatatttcaattgtgaactggatcttatgggcagtttgtttagcggttgttttctattttaagaactcagctcatatggaagcagcctacggtttagcaattacgattacaatgttaatgacgacgattctcttgttccattatttgggacgacgcgagaagcggtggttcttggcttatgtcgtattactattctttggcgcaattgagacgattttctttattgcaagtgccgctaaatttatgcatggtggttatgtgacagttttaatcgcctttgtcattttattcatcatgtttgtttggtatcggagtaattcgattaaggaaagtaatacctttaaatcaagtacagtgtcactattagcgtataaacgccaactacatgacctacggaatgaaacgtcattaccattgtatacaacaaacttagtttatctttcaaaacctcaggcagaaccccggggcaagaatatggtgaaaaagaatatcctctattcaatattggataaacggcctaagcgtgctcaggtttattggtttgttgctgtgaatgtgacagatgagccttacactgcagagtacacggttgatacattaggtacggattacattgtcagtgtccaattgtatttaggctttaagatggaacaaaaagtaaatatctttattcgccaaatcatccatgaaatgattcataatggtgaattaccagcacaaccacaacattacacgacaattcctaatcgagaagttggtgatttctcgtttgtgatcattcaagaggacttatcacctgaaacacaaattagagcaatggacaaagtcattgttcaaattcgtttatggttagagaagtttacagatacgccagcatcttggtttggattagagtatagtgatgtctttgtcgaacgaattccgttagttttaggacgccaaaaagcaattaataagtaccatttgaagcgtcgacaagaagaatcttaaaaaaacaagcaaaaaaacgacttttttaagtcgtttttttgttggataagaatcctatattaccagtcatcgtaaggtacaatattacagattaggtcgttaatcggttgttttgttacaggattgtcatcaattgttacttgtttgatacttacaaatgatttttagatggtatattaatgtcacgttattaatacgacattaaataaacttttgaaacaacaaggagataaacacacaatatgaaatcacttaaaacacttttattcagcgctacattatcaactgccgcaactgcaggtcttttattcgcaagtaacggccatgccgatgcagctacgaactacacggttgtcagcggtgatacattatcatcaatctcacaaaaatttgctggtaacggcagcttgatcgaaaaaatcgctaacgctaataaaattgctaacaagaacttaatctatgttggcgaaacattaacaatcgatgaagaaacacaaactgttacggtagcacctgctacaacacaagcagctacaacaacaccagtggcaacacaacaaacaacacaagcgacaacaacacctgttgctacacaacaacctgttcaaaaagcagcaacacaaacacaacccgttcaacaacaagcaacaacaacgccagttgttaaacaacaacaaacaacaactactacgacaactacaaacacaacaacatcaacaactaactcagctaaagaatggattgccaacaaagaatcaggtggttcatactcagcaagtaacggtcaattcgttggtcgttaccaattatcaagctcatacttaaatggtgactactcagcaagtaaccaagaacgcgttgcagatcaatatgtaacaagccgttatggttcatgggaaggcgcaaagagcttctggttagcaaacggttggtattaagataaaatagtttaaactaaaaagcagtggctgacgccgctgctttttttatggttaaaattaaattaaatttgactaatgcgaatgtacgttcgcataatgtaacaagagaacagatgattgaggtgatcttgatgcaaacaagtcgagtcataattgatttgcaacaacagaatttaagtttatatttaaatggttttggcgtcttagagttacgacaacaagcaggccaatcaagcgatttacgagatgccatgaactattactacaatcgtagtaaatttccgcaatttattggacaatatttaccacaagtcactttaattgaaataaatcgctggcaaagtcaattagaccagcaagtgcaacagatccaaactttaaccaagggcattgtataagtgagaaggtgggataattatgcagtacgttagtcttcaaggaacgattggcagtacaataaaagttatttcgtttgatccgtacttagttcggtttacattacaaacaaccactcaaaattataattgcttggtcgccaaggatgcttttaatttaatgtatgtcgcggagcagaatgcgcacattgccgtttttggacactataattgtagaagccaactcgtgattgataagtactacgttagaaatgcggtgagtgagtaatgtatgattatactgatgaaccgcgacgaattatattaatgattgattccaaatcattttacgcttctgtagaatcagttaagagagggctaaatccgttaaaatcgattttggtggtgatgtcaactgccaaaaacgctggcagtggcttggtgctggcagctagtccacgagctaaacaactttttggtatcagtaatgtgacccgagcgactcaagtaccggtctatgataaaaggctgattgttgcggaaccacggatgaacctttatatagaagaaaatttaaaaattaatcgtatttttcaaagattcacggcagaagaagacatccaaccgtattcgattgatgaatcattgttagatataacgacgagttggcatctttttggtcaaacgccttatgaagtagcacgccagattcaactgacggtgaaaaaagaaacggggatttatttgacagtcggcataggcgataacccgttgcttgctaaacttgctttggacttggaagctaaacataatcacagtttaattgcggagtggcactatgaagatgtgcctgataagctgtggcccgtaacggatttagcgcgtgtctggtcaataggtcagcggacggcgacgaagttaaatcaattacagattcattcgatgggggacttagcgcatactaatccatatgatttaaaacaaaagatggggattattggcagccaattatttgcgtttagctgggggattgatcgcgcaattgtccatcaaaaatacacaccaaaagagcgctcctatgggaatagtcaggtactaccacgtgattattttttacaaacggaaattgaagtggttatcagagaaatcgctgaacaggttgctgcgcggttacgtgcgcatcgtaaacaggcgtgtatgattagtttggggattggcttttctttttctgaaaatgaaagtggtgtccattcgggatttggacgatcattgaaaattgaaccgactaatggtaatcatgaaattaccacaacagcgattcaattatttcgagagcagtggcaacatcagaccattcgccatattagtctgacttgtggccaattgattgacgatgacgtgcaacagttggatttattcgatccgcaattgcgtcatttaaagcaacatcaattagatcaaacggttgacgaaattcgacagaagtttggttttgcgtctttggttaaattatcaagtaaggataagggtgcaaccgcgattgaacgggccggacttgttggtggtcatgcggacggcaatgcttatgactaaacgttttgataacaaactagtgacgcaatttctgaaacatgattatcacgatcggggcatgatgaagtggcaggggttttatctaagtgatcatacatcggtacgtgccaaggaagcgagcatcgctgacgtgcagttgcaccgaacacatcttgctaagatgtctgctaaacagactagtgaggtaatcaacgaggtgattattaaaaagacgatggtcacggtggacctagcacagcgcaaccgggatggtcagattttggcaccgataacgggtcgaattactggttgggtggccaatcagatagtagttaacaaaaaagctatttatatagaagaaatttacgcaattaagagaataaaatgatttaaacacacaaaaaaagcctgatttctcagacttagcgaaaatacaattgggtatatagggctcgaacctataaattccggattcagagtccggtgccttaccaatttggcgaatacccaatgttatcaacgaatactatgatactgcatgccctaacgcttgtcaattctgatttttaacaaaaccagtaaaaaggactatactgatatgggaggctatcgatatgaataaagtagatgttgaaaagttatttcagggaaaggtgatttcccaagatcagaaccaagttcatattcaattacaagattcacgtaaactattggagttatcgattgaaaatgatgtgttggccttaattgaacagcatcgtgactatgcattgaatattctgcagaatctcaagcgcaaaaccaatcgtaaagtcacaaaggaatcgattactattaaccaccggaactataagatttttatctagtttaattaataattgacattacgggtgttattcgctaatatattaggtgttccaattattgcccgttggtcaaattggttaagacgtcgccctctcaaggcggagttacgggttcgatccccgtacgggtgatattgataacatcctagaatggaaagagctattaaactaaagtttaatagctctttttttgtaggttttatttttttagtgacagaaactgcacctattcttgttaaccatcaagggttacgcggtcgttagtattaacgttctgatttgtgtaacctatgataatcacttaagtgttcagtttttatgcccatttttttggaaaaataagtagcttttaatcaatgtgattggttaatttagtgtttaatatcggtaaataatatttaaaagtatcagtaaatgatgtcagattgacaatttttttggatttaaaatgaaaaataaagatattttcggtaatttatagataaaacagccttttttttgcgtcattttcaatggattgtaaatcctatattaccagtcatcgcaaggtacaatattacagattaggtcgttaatcggttgttttgttacaggattgtcatcaattgttacttgtttgatacttacaaatgatttttagatggtatattaatgtcacgttattaatacgacattaaataaacttttgaaacaacaaggagataaacacacaatatgaaatcacttaaaacacttttattcagcgctacattatcaactgccgcaactgcaggtcttttattcgcaagtaacggccatgccgatgcagctacgaactacacggttgtcagcggtgatacattatcatcaatctcacaaaaatttgctggtaacggcagcttgatcgaaaaaatcgctaacgctaataaaattgctaacaagaacttaatctatgttggcgaaacattaacaatcgatgaagaaacacaaactgttacggtagcacctgctacaacacaagcagctacaacaacaccagtggcaacacaacaaacaacacaagcgacaacaacacctgttgctacacaacaacctgttcaaaaagcagcaacacaaacacaacccgttcaacaacaagcaacaacaacgccagttgttaaacaacaacaaacaacaactactacgacaactacaaacacaacaacatcaacaactaactcagctaaagaatggattgccaacaaagaatcaggtggttcatactcagcaagtaacggtcaattcgttggtcgttaccaattatcaagctcatacttaaatggtgactactcagcaagtaaccaagaacgcgttgcagatcaatatgtaacaagccgttatggttcatgggaaggcgcaaagagcttctggttagcaaacggttggtattaagataaaatagtttaaactaaaaagcagtggctgacgccgttgcttttttttacactattaataaagcgctttatttatgttggcaacccctgcttaaaaagtgtacactagaattaatttaaaagtttggagttttgggcatgaaagtattaggaatattaggtagtcaccaacgcgatggcgttaatggtcagctattacaagccgttttagcaggtgtgggtcccgaagatgatgtctcaactatttttctaaacgatttccaaattttaccggacacggggcaaccaaatccggtgttagatcaacttgaacaacaattgttagcagctgatgtgtgggtattagttgcgcctacttattggggcgcgatgtctggtgtcatgaaaaacttcttagattgtatgcgaggccgcctagtacgctttaatcacgtaggagacgctttgccagatcgttttaaaggaaaaagttacgtgactattagtagttgctatgcgagtggtttggaagagtttgtgaccggtatgactgatgggaccttcagaacttttgataaggtgcttagtgcagccggactgctgaagattcgagaagttgttcaaactaactcgtttgggctaaagacactacctatgaagaaacgcactgagtgtcagcaaattggtgctagccttcagcataaagcaaaaaggacggatgataccgtgaaacgttatggacagttatttggcatggttgcttgtgccacattgattaccatgttattgcaacggctcgttaatattgtgttaccagtaacccagttttgggcgaattacgtttcgtttgtattgattttttttatcttacttgcgagcgtactccgctttttcacagtggttaaacatagaagacattaggaggctttcttatgaaaattgcattaattgcacacgatcgtcaaaaaccgttaatcgttaaattagcaacagcttaccagcctattttggcccaacatgaactttttgcgacggggacaactggtcagaaaattattgatgcaacgggtttatccgttaaacgctttaagtctggtccgttgggtggcgatcaacaaattggcgctttaatttctgaaaataaaatggaccttgttattttcttacgagatccattgacggcccaaccacacgaaccggatgttaatgcgctcattcggttgtctgacgtttacgaagtgccacttgccactaatattggcactgcggaggtgttattgcggggccttgatcaaggtttgatggctttccgagaagtcgttcatgatcaagattctaatccaatcaatctataaactagaaaagaaccgggactaaatttattttgtcacggttcttttttttgcgtataatagaagtattgagttggagggtttgtcttgcaaaagaaaattaattttcacgaccggttaggaacagccatgtttttaacctttatcggtggttttttagatgcttattgtgtgattctacgaggtggcgtgtttgctagtgcgcaaacgggtaatattgtgtttatcggtgttgatatcgctactaatcaatggtcacaattacctgaaaagattatgccaatcatcgcttttggaattggggtcattattgtgcaattggctcggcgccactttaacacggcacgcttgaatatttggcgtttatggttactcgcattgcaaatcattgttttaattattgttgggtttttaagtactgctgtccctaatatgattgttacgacgatgttatcgatgtcgatggcaacccaactagccagttattcaacggttaatggttatccatatgccaatacctttacgaccggtaattaccggaagttagttgaaaattgttatttatttattgccacgaaggaaaaaaaataccaacaaaaagccaagtattttgggctaattgttggtagcttctttatcggaacgattggttctggtttcttagtcaaagtcattaatgtccgtgcagcctggttagccgcagcattgctggcaattttctttgcattacagttatacttcactgaagaagtaatcgctgaaacgaaaaaaatgagccgttaacggtagtgataagtcatcaccagtgcgacaaaatagcctacgcaaacgagggtgctgagccaactggcaataatgataatcgggtgcgcaataaaggcccgcataacgaataagaagagggttaaaattgcgtatttaacgaattcaacctttaatgcttgaaattgtgggttattcaaaagaaagatccactaggaaaatatgacggtcggaaagatgggtggttgtgatccagacatcttgaaagccgtctttttgtttctctattgtttgttggtaaaaagcttctaataagtcacggtgggcattaacatagtctgaatcgatacggttaacgtggagccgcatgtctgggaatagtttttcaacatctggtagttggacctgatcatcgatgccaaagcggataacgttagcatattggaacggttctaacgtcactgtttcaggattttcttggatataggttaaaatagttgttaaagtagacataggcgaattcctttcaatgattaaaaaatagttagtcctgctgagagattgtttaagacatgtaatatgatactactcttaatggtttttgtgcgataataaacgattgctaagactaatccgagtagtgctttggaaatgaaatagatcggatcagttgaaacgtgtacgagaccgaataatagagcgctcgtcataatgtttagaataggtgatttaacgaagaaccaattcattaagaaaccacggaaaagtaattcttccatcattggccctaagattaaggtatagggcaacatgaaaataccgaggacggcaaaaatttgaacgaggccatcgacattggcgtttcctgttttctgcataaagggcaccgtcaaattattaatcactagcatggcgacaaatccaattagaattgcacgccagtgggcttttgaaaaatgattatgatattgcggcccttttactttttggtaaagataccacattaaaatggtgatcccaatggttagaattaaaaagagccacccgacaattaaaattaaatgcgtcgttcgctgtgcctttggtagggcagctaagctacctactaataaaagggggatttgttgcatgattaaaagcaagataaaacagataatgtgtttgaaatgtttaatacgcgccacctccatgtggctatcatagcatattagtgagattatcaataaaaaaaattctttttttgctatttaataatttatatggtattataaacaagtaatcaatattgaagcgtaatttaagttttgaatttcataactctaatcagcgtttatttatcattatttattgcaacaaaacgtacatgtatatgtattaggaggaaattattatgaacaacggtacagtaaaatggtttaacgcagacaagggttttggttttattactggtgaagatggcaaagacgtatttgctcatttctcagctatccaaggtgacggttacaagtcattagacgaaggccaagcagtatcatttgatgttgaagacagcgaccgcggtcctcaagcaacaaacatcgttaaactttaataatgttttaaacctcgcttatgcgaggtttttttatgctcaaaattaaaaaggttggttaaacaattatttcttgtttagccaaccttttttagttgtttacaatttattgtaattaccagtgctataaataactaattaaaaggcttaaagccgctatctggtgattattatcgtatttttttaatttatattaattattttgattcagattccttgtcgtgataaagtgccttgagcgttttgttttcttgttcgagatgatcgagcttcttaaggatttcgtctagtttgtcgtcggtatcttgagtgaagtaactggtaattgaactggtgagtgtaccgataaagccaatgccaactgacatcagcataattgctgcgatacgaccgattagcgtgtgcggtgagatatcaccgtagccaaccgttgtggcggtcgcaatcgcccaccagaatgaatcggcaagggttgccttttcggcgagtgcgtataaaacggaagcgatgattaatacggcggcactgacataagtcagatagagcagaccattttgcttaagaaatttcttggaatggcgttgtaatttccccgttaagcccaccaagcgcgtaaaacggaaaactttcattaacccagcaatgcgaaataggcgcccgagtcggaaaaatgaaaaaagagtgcttagtgggatgattgcaagcagatcaaagatatttgtcttaaaaaagcggcgtttatcagtagcaaaccaaagacgcacgaaataatcgaccgtaaaaataattaaaatcgtgttatcgatggttaggtagggtgcagtcgttagatcgatgagactgctgtagtctaataggacgaagataattgagatgatggcgagtacggcgatggtaatggtgtaaaaacgtttgagtaacttcatatatatgccccacaaaattagtttttaacaatagtatttctattataggattaattgtgacgttagacaataacggctagcgagtgatattgcatcaattatgacgataacttagtattgcatccaattaaaatcagtgctaaaatgacagaacgtcatattttacgacggtatgtcatttttagttggaaggagtcttaatgcatgcctaaaaaaacttttttccggttgccggcagaaaaacagcaacggctattaaaggccgcccatgccgaattttcacgggttccttttaatgaagcatcagttagcaacattattaaagctgctgaaattccacggggtagtttctatcagtactttgaagataaggctgatattttcttttacgacctcagtttgctgcgtgatagttctaaacaggatttggaacagctcttattagataccaagggtgatcttttcaagacgattcgcattttcttcaaggcaatggcgaatgaagccattaatggtgagaatgcacagttctatcggcacttatttttacacatggatttcaaaaatcggcgcaagatgtcgcccgaattgatgcatgcgcatcaaacggagggctttcagtttttaatggatcacgttgattttagtttgttgaaaattgataaaacgcagccgaatgctgttagattgctcctccatcaattaatgaataacgtttttcaaagcattgcttcctattatttaaatcgtgatactgagcaagccttaacaatagaacaaatctacgaacacttcgaattagtcactggttggttagaaaccggtgcgagtgttcaggataagtagaatagaaagaaggaactaaacgcatgattaaacttgcaaaaaagagaatgtcaggcttagccgtttttggtgctgtcttattcatggtcattcaagttgttagtaacttgtatctccctaatttgacgtctgatattgttaataatgggattgccaaaggcgatattgattatatctggcaagccggcttcaaaatgctcggcttttcattgatcagtattttagccgcaatctgtaacgtttatttagctgctaagacatcacaaggtctgggccaaaaattacgatcagatatttatcgaaaagtcatcaatttctcccatgatgaaatggaccaagtggggacctcttcactgattacccggacgaccaatgatgttgttcaaattcaaaatgtggcgatgatgttcttacgaatgatgatcatggcccctattatgttgattggtgccagcttcttggcttaccaaaagaacgcgcaattaacatcaattttcgtcgttgtcttaccattaatggcaatcttcatcggtgttgtgatgtattttgccgtaccgctctttaaggcgatgcaaaagaagactgatcggattaatttggttttccgtgaaggcttaaccggggtccgggtaatccgtgcattccggcgcgataagttcgaacaagaacgttttgacgacgcgaacttagattacacacaaaatgctaaaaaagtctacagtatcatgtctgtcatgttacctgtgatgacattgattatgagtgggacaaacattgccatcacttggatgggtggtcacttaattgctgatcaagctatgcaagtggggaatttattggccttcatgacttatgcgatgcaaatcttaatgagtttcatgatgctttcaatggttttcgtcttcattccacgggcacaagcatcagctgttcggattaatgaagtcttggatttacaaaccccaattgaaaatccagaaaatcccaaaagttttacagatcaagctgtcagcttagcctttgataatgttaacttccgctaccaaaatgcagaaaaattagccttagaaaagattgattttcaagcgtctgctggtcaaaccgttgcgattatcggggggactggttcagggaaatcaaccttggtgaacttgattccgcgtttttacgacgttgaagccggccaagtccaagttgatgggttgaacgtcaaagatgtgacgttacatgatattcatgaacaagtcgcatttgtaccgcaaaaagccaatctctttacaggaacgattcgcgaaaatatgcaatatgggaatccggctgcaactgatgatcagatctggcatgcacttgaaattgcccaatcaaaggatttcgttagcgaactcgatggtggcttagacagtcacgttgaacaaggtggcggtaacttctcaggtggtcaacgccaacgcttagcgatcgcccgggcattagttaaacgcgcatcagtttatgtctttgatgattcattttcagctttagatttcaagacagatgcacttttacgcaaagccttgaaagaagatgctgaaattcaaaagagtgtcgtcgtcatcgttggccaacgggtctcaacggtagctgacgccgacacaatcttggtcttagatgaaggtcaaatggttggtaaagggacacatgcccaattaaaagcaaccaatgcaacttaccaagaaattatcaattcacaaatcagagagggggatgaagcctaatggcagaaaaagcagcaacaaaccggccacaaggtgatcatggtccaggtcgcggcatgggtggcgtcgttgaaaaacctaagaatttctggggtacaactaatcgtttattgaaatacatgtcgagccgtttaattgccttagtatttgtcattgttttggcgattgtctccgttattttccaaattagaacgcccaaagttttaggggaagcaacgacggaaatctttaaaggggtgatgaaaggcaatgccatgcaaaaagctgggattgccatggatcgcttaccaattgatttcgataagattcaacacattatcatgacggtaatcttgatgtacattgcttcagccgtcttcagtttcttacaacaatttatcatgacgcggatttcacaacaaaccgtctacgaattacgtaaggaattgaaagataagatgcaacgggtgccaatcaattattacgatacccattcaaacggggatatcatgagtcgtgcgatcaatgatatggataatattgccagcacgctacaacaaagtttaacgcaaatggtgactagcacggtaacatttatcggtgttttatggatgatgctgacgatcagttggcaattaacattaattgccttagtcacaattccgttgagtttaattgtcgttgggattgtcgcacctaagtcgcaaaaattctttgctgcacaacaaaagagtttaggcttattaaataatcaaatcgaagaaaacttttcgggtcaagtggtcttgaagacctttaaccgggaacaagtgacgattgatacatttgaagaacaaaatgaaaagttgtataaagctgcttggaaagcccaatttatctctggtgtgatcatgccattgatgactttcgtcaataacttagggtacgtcttcgttgcgattatcggtgggattcgcgtctcacacggtcaagtcacattaggggacatgcaagctttcatgcaatatacacaacaattctcacaaccaatctcacaattggctaacttggcaaacacaattcaatcaacgattgcttcagctgaacgggtttttgctgttttagatgaagaagatatgtctgaagaaccttcaactgtcccagttgtgcaagatgatgccaaccaattagaaatggaacatgttgaatttggttaccaaggcaaggatcttttattgacggactataatttacaagttaaaccgggccaaatgatcgcgattgttggtcctaccggggctggtaagacaactattattaatttacttgaacgtttctacgatgttagtggtggttcgattaaattaaaaggtgtcgatacacgtgatatgagtcgggaagaattgcggagtcattttgcgatggttcttcaagatacttggctattcaccgggacgatttgggataacttgaagtacggtaatgaatcagcttcagacgaagcgattttggcagctgctaaagcagcccatgttgatggctttgttcgtcaattacctgaaggttataacacagtcttgaatgaagaagcttcaaatatttcacaaggtcaacggcaattattgacgattgcccgggcctttgtggccgatccagatatcttaatcttggatgaagcaactagttctgttgatacgcggactgaaattcatatccaacacgcaatggaacgtctattacaaaatcgaacgagtttcgttgttgcccatcgtttatcaacgattcgggatgcggataatatcattgtgatgaatcacggttcaattatggaaaccggcacacatgatgaattgatggttcaagacggcttttacgctgatctatataacagccaattctcagggaacgtcgagatttaaattggttttaaataaaggacatcatcaggttaaactggtggtgtctttttttagatggcgtatactaatagtattgattcaaataggaggttttgagatgcgatttgaacaaacgattcaccaaattgaggcgttagtggctgatgaggttgtaccaggtgtttcatatgccgtgattgaaggccagcaagtgacgacgaaggtccttggttattcagaactgacgcctaaactaatcccgttagaaccaggacaattatacgatttagcgtctttgacgaaggtgattgggacgacgacgttgattctccgtttgttagagcggggacgcctgtcacttacgaccaaggttcacagcattttaccagcgtttaaagatcgacgggtgacggttttgcacctcttgacccacacatcgggcttagagggctatattcctaatcgtaatcagttagctgcaccagcattaaaagaagcgctgttgacgcaattgacggttggtcctaattttgggaaaaaggtcgtttacacggatatcggcatgttgtatttgggctggatgctagaagtgatttatggcaaaccaattcaagacttaattcaaagtctggttttaacccccctagggatgactgagagtacgtttgccccagaagcaagccgagcagtacccaccgaactaacaacggctagaggccttattcaaggtgttgtgcatgacccgaagagttatgttttgcaaaatcatagtggtgcagcaggattatttgcacccctagacgatgttgtacggtttgcgcagttccaactagggcaattaaaagttgctgaggcccccgttagccaagcaagtgttaagggcttataccgcgactggacaccagcccatctaggccggtcattgggttgggatttacgttttacggcggatcagaccccattgatttatcataccggttttacggggacttttatgatactcgatcgaaaacgccagacaggcttggtagtgttgagcaatcggattcacccgacagcagataatcaaacttttcttgatcgtcggacaatgattgtggatcaattcttggctgaagataaggcctaatcacgaaatcgctttaaaaacagttactaccatgtcttatccgctttcatttatggtagaatagaaacattgataaataaagtgcattaggagtgattgaattgacagaaccattatttctaaaaccagttttccaagaaaaaatttggggtggccgcaaattagcagaagccttcgactatgatttaccagatggcgacattggtgaatgctgggcgatttcagcacatccacatggtcccagcacaatcgaaaacggtcccttaaaaggccttacattagatcaagcttgggcccaacaccgcgattattttggtgatgccaagggagaagttttcccattattaacgaagattttggatgccgaagcaagcttgtcagttcaagtccatccagatgatgcttatgcagctgctcacgaaggtcctacagaattaggtaagactgaatgttggtatattttagatgccgaaccaggtgcttacttaatctatggtcatcacgctaaaaacaaagcagaactaacggaaatgattgaagcgggtaagtgggatgacttattgcgcaaagtacctgttaaaacgggcgactttttctacgtcccaagtggcacaattcacgccttgaataaggggattatggcccttgaaacgcaacaaagtagtgatacgacttatcggttatacgattatgatcgagtagatgcgaagacgggtgaaaaacgtgaattgcatctaaaacaatcaattgataccacgattgtgccccatcaagatcctgttttgaatattcaaacagaacatgttggggattcaaccatcacaacttatgtgcaacccccaatgtcaccatttttcagtgtttaccaatggttggtcaagggtgatttacactttgaccggacaacagccccttatactttagtatcagtggttgacggtgaaggtgaattggttgcggatggtcaaacctacccaattcataagaacatgcactttgtcttaccatttggcattaagtcatgggacttaaaaggtaacatgcaaattattgcttcagaaccgggtaacaagtaaaataaacataacgaattgcaaccgcagccgtggttgcaatttttttaatgattaaaagagtagggtggcagttatgcaaaaacaaattgaagcaattgaacaattcgtacgaacggcgttagctcaggagcatagtggccatggttttgatcacattcaacgggttgtaaataatgcccgcttaattcaacgccaagttggtgatggcgacttaacaacgattacattagccgcactattgcacgatgtaattgatgaaaaaattgttagcgatgtgacacaagcccgccaaagcgtagcggctgttttaacccaaaatggcattgataagatgcaatcaaccgttatttttgacatcatcgatcatatgtcattttctaaaaatattaatcagcaccaagcattaagtttagaagggcaaatcgttcaagatgcggatcggttggatgcgattggcgcgattggtattggccggacctttatgtatggcggcgctcacgatggggtggcttatgatcctgaaattcaaccacgggccgagttaaccaaggctaattatcgggaaccttcaacggtgattaatcatttttatgaaaagctctttaaactcgcggcgacgatgaatacgcaagtggcgcgagaaatcgcaaccgctagaacacaagtcatgcaagattttgtggccgagtacattgcggaatggcaaggtgaaaaataactaaaaaagaacgttggctagaattacttctggtcaacgttctttttagttaatttaattctggttctgctaaccagtcgttttgtaagagttcatgggttttctttttgagggggagccagagttcagcgcgtaaaacgttcaccaatgattcccagaaaagccgatccttcttttgttgatcggtgatatgtagttcgataatttcgccggactcggttgtcgcgaggaccttatcttgactatcaatacttttaattttaacggattcaatgttttggttttttattagcatatcgatcgctccttttaatctataacaacagtatagctggggaatgttattaaacaattgatattttatgaataaaaatcggcttttttctttaaaaaaggttaagtcgtttccttaatctttagattaaggtttggattaaactagccgtttcctcaatcgaacgatcggcaacattaatcgtcgtggcgtttaattgttcaaaaatctggttggcataggcaagctcgtcaccgacggttgtcatattggaatagttcgttgtttgcggtaatcccaaggtggccaaacgttcttggcggatttttagcaatgttgaaagtggcatggttagaccgataatcttatgggcgggcactttgaataattcttttggtaacggtacgttgggaatgagtggtaagttggccacgcgatagttttggttggccaaatacatactgagtggcgtttttgaggtccgtgaaacgcctaataaaacgatgtcggcttctaataaaccacgtggatcttgaccgtcatcgtaacgaacggcaaattccatggcgctaatgcgatggaaatagtgttcatcaagtttccgtaatgagcctggggtttccagtgatgcggtttgactgcgttcgctaatggcggtggtcagcggagacagaaggtcgattaaggttaaatgcttggcttggcaaaattgcgtcaccgtttcttgaagcgtgtggttaacaagtgttgtgacaataattgcctgttcttgatgggcatcttgcaaaataggggttaatgttttttgatcggtaataaacggaaaccgttgaattttaagggtgactgacgcggggaattgggcgttgaccgctgcgataactgttcgagctgtttcgccaattgaatctgaaataataaaaattggaatcgctgacatttttgtaatcctccaaaaaattatgattgatagtgcagtccagcttcgatgaaatagcgcataataattgatttggtgattttgccaatgacggtgataccgtcgattgcaaccactggcaatgaatcaacctgatgggcgattaaccgttgaccggcgtgtaagacagttgtgtcctcggtggtcgttgtaatgtttggcatgcgcgtcataatcatggcgactggagtagcttgtgtattagttgtattaatggttgcccgtagtaagtccttccgcgataaaacgcccagtaaacctgactgttcatccgttacataaagcgacccaacatcgtgcatgaatagttgcgtgaccgcttcatcgatcattgtcgtttgagggattaaaagcggtggcaccatcagttgaccgactgtttcttggtagagttcatcggttaagagcggtatcacttcttggccaacgtaaaagtagccaactttagggcgggcgtccaaaatgccggtcatcgttaaaattgcgaaatcattgcgcagtgttgcccgagaaaggtgtaattgatcagcaattttagtgccgctaatgggttgattcgctttgacgattttgataatttcctgttgacggttagataattccataagcactcctttgaataaatcggtttcaataaacttattataggatagtgttacgctaattgcaatatattcacataatagcgtgacctattaaaaattataatctacactattgacttgctatgtgacacactatataatgcggttatcgataaaatttggaggcgttatcatgaactatatttatgcttttgctgaagatcaaacgttaaccaatcaagaattaggtggtaagggagccaacttagcggaaatgacgcgattaggattacccgtgccagccggttttacaattacaacggctgcttgtcgacaatacttagcaagtgctaaacaagagacgggctttttagaagacgaattaatgaaagcggttcatattcttgaagaaaagacgcagcggcaattaggaaatactaaacaaccgttattggtgtccgttcgcagtggtgcaccaatctcaatgccggggatgatggatactatcttgaatttagggttaaacgatcaaacggtaatcggcttagctgaaatgaccaatgatccatggtttgcttacgattgttatcgtcggttgattcaaatgtttggggatgtggtttacggtattgataagccaatttttgaagcggcattaacggcgcttaaaaataaacggcaagttcaaaaggatacagacttaacgttagttgatttaaaacaattgattgaaacctataaaggcttgtacgtagcggccggacaatatcaatttccacagtcggttgatcaacaactgcgactggccattgaagccgtttttaaatcatggcagaatccacgtgcgcagacttatcgacgtttaaatcaaatcgacggtgccatgggaaccgcagtcaacgtgcaacaaatggtctttggtaattatcaggggcaaagtggaaccggcgttgcgttcactcggaacccagcaactggtgaacctggtttgtttggcgaatatttattgaatgcacaaggtgaagatgtggtggcggggattcgaacccccgaaccaattgcgacgttaaaggcgcaattgccagtaatttatgaacaattcaaaacgattgccaatcaattagaagcccactatcgggatatgcaagatatggaatttacgattgaagctgggcagttatatgtcttacaaacacgggttggcaaacgcaccgcaccggctgcttttagaattgctgtggatttagttgatgaaggtgtgattgatcggccaaccgcgattagtcgcttgaagccgacgatgattgatgggttgttacacccactttttgaaactagtgcggtgcaacaggcaacacagttattgactgggttaccagcgagtccaggggctgctactggtgcgatctatttcgacgcccaaaaagcacaacaggcacacgaagctggtgaaaaagtcgttttagttcgccaagaaacatcaccagaagatatcgatgggatggtaattagtgaagcaattgttaccagtcgtggtgggatgacatcacatgcagccgttgttgcacggggaatgggctgttgttgtgtcgttggttgtcagcagcttcaagtggattatgaacaacgtgcggcgcattttgccggccgagttttaaaagaaggggcgattatttcggtggatggtcataccggtcacctttatttaggggcgttaccccaacaaaccggcgttcatgaaacaacgcttggaacggtgctcagttggtgtgatgagattgcaccgtttgcggtttgggccaacgctgaaacaccgcaagaagtggcgactgcttttgaatttggtgcacaggggttaggactcgtgcggacggagcacatgttctttggcccagaacgaatttttaaaatgcgccaaatgattttagcaactgaactagcggatcgccaagtggcgttggcggcactaaaagccctccaaataaacgactttaagcaaatcttttcattagctgaagagcgaccatgtacgattcgcttgttagacccaccattgcatgaattcttaccgcaaaatgaagcggaacaggctgaattagcaaccgcgctaggcattagtctggctgaaattaagcgacggattgctgacaaagcagaaattaatcctatgttaggccatcgtggcagtcgtttggcggtgacctatcctgaaatttaccaaatgcaagtcttagcgattgctgagagtgccttggcggttcaaacaacgcaccaccatgctgtagctcctaaaataatgttgccgttaattggcacagcgactgaaatggcatatctaaaacaactattacaacaaaccatcgacgactatttggcagaaaatcagcaacaactaacttatcaaattggcacaatgattgagattccgcgggcgtgtttagttgcggatcaaatcgcagcgaccgcagatttcttcagttttggcaccaatgatttaacgcaaatgacgtatggtttttcccgcgatgatattggccattttatgccggattatcagcaacaaggcttgatgccggctgaaccctttcaaacgcttgaccaagatggtgtcggtgctttgatgcaattggcggttcaaaaaggccgtcaaaccaaacctgatttatcgattggggtttgcggcgaggtcggtggtgatccaacagcgatgccgttttatcgtgatttgggcattgattatgtctcgtgttcaccataccgtgtgccaagtgcgcgtttggcagcggctcaaagtcaattaacattggcagattaaaatgtaaaaaagaacccctgcaatatcgaaaaagatattgtcggggttcttttgggagtacttaattttgcacctttttgacacctgctgcgtcgacttggtaacgggattcttcgattggaaggtccgttagtggttgaagatcaaactctgggaaacggcggctaatcgctgttgttaagagtcgtttagctaagacaccgttatgggttaagattgggccatggaagtaagagccaaaggtgtttttataaacacaaccttcagtgccatcttcgccattgttaccatgaccacgtttaacataaccgagtggtttttcatcttttcctaagaaagtccgaccgttatgattttcaaagccgaggtaagtttcgttaaattcacgattttcaatcacgatatcgccaataaaacggctgttatcttggctgagtgtatagtgatcaagggcaccaatcccaggaattttatcaccgttcgcaccgatgtagtagtggcccaataattggtaaccaccacaaatggcaagcattacgccgccattttcgatgtatgctgtgagggcagcttttttactgttaagatcttctgaaatgattttttgttcgaaatcttggccaccaccgaagaggacgatgtcgtagcggctggcatcgaaatcttgaccaatgctgatgacgtcggtttctgtttttaaaccaatctttttagcataataatcgaggactaaaatattgccgagatccccataagtattcattaagttgccataaagatgacaaatttttaaagtttgggtcatactgacagtcctttcttaatgtagttggcctctgccatttttttacgtaattgcaagactgccgtgtaggtagcaagtacgtaaacatgtttcgtaggggctgcttcaatcgctgctaatgtcgcatctaagtcggctgtttcgtgtagttgttcgtcagtaacgccagccactttcaagcggaaagtgatatcatcacgccgttcgccaccggtgataaccgttggaatgtggtgtttcaagaggtcttcgaattcaccgtcccaaatccaacttgtatcaataccatcagcgtagttagcgttcagtaacattgccaatgagaaatcttctggatcagagctaatcatttggaggacttggtttaagccaactgggtttttaacaagcaccaatgtgaccgccttgtccttcaattgaatcacttcttggcgaccgaagacttttttattttgcgtgaaggctttttgaatatccgaaacagggacatccaagaagcggccaacgctgtaagctgcgagagcattatagatgttgtacataccaccgattgagatttcaaaaggggcttggttaatttcaaattgagaacttgttgggcgcatttcgttgatggccgtcacttgatccgttagttcagggcgtttgaagccgcaatttgggcagtagaatttgccttggctactataactgatgaacttgtagtgaatgatatgttggcaaacagggcacaaaacgccatccgtattgcttggtgcaagcatttcgccatctggttgatgattaaaaccgtagtaaattttaggattaggtaattcaaccgatgagaaaagtggcacatcaccattcataattaaggttgtattaggcacgagcttaacgccagccaaaatcttattataagtggtataaatttcaccaaaacgatccatttgatctctaaagatgttagtcatcacaattgccttaggttcaacgtagcggcaaagtggttcgacgttggcttcgtcaacttcaagaattgcaagttgtttttgaccttttttaggatgatgggccaaaaaggccgtcgtaattccttgcatcatgtttgatcctgttgaattggtcatgatgttgtcgtatttttgcttgagcgtttgaaccgtcaaagccgtcgtcaacgttttaccattagtcccagtgatgataatcacgtcgtagtttttagttaagtttttcaaaacagcggggtctagatttgttgcaatctgaccaggtaaagagctgccgcctttcataaaggtatgtaagaaccagtatgaaaaacgtcccgttgttgttgcaaatgaacttttaattgtcatgcaagccaccctttcaatgttcataataatagcatattttctggaaaacgacgatagggaagtcatgaaggggcaaaatttatggaaactttagtttttatcggggccgatattgttgcgattcctattttcaggtatactagactaaaatgtgctttgatataggggtgtttggaaatggcgcaattattttttcgatatggtgcaatgaacagtggtaaatcaattgaaattctaaaagttgctcataattatgaagaacagaataaatcagtgattatcttaaccagtgggattgataatcgtgacggcgtgggaatcgtttcaagtcgaattggtttgaaacgcgaagcaacaccaatcttttcggacacgaatatttacgaattggttgaagcaactaatccagatgccgcttgtgttttaattgatgaatcacaatttttagaacggcaccatgttatcgaagctgccaaagtcgttgatgatttgaatatcccggtgatggcgtttggtcttaaaaatgattttaagaatgaattatttgaaggctcgaaatacctcttattgtttgccaataagatagaagaaatgaagaccatttgttggttctgccgtaaaaaggcgattatgaacttgcgaatgaataacggcttgcctgtttatacaggtgaacagattcaaatcggtggcaatgaagcttactatccagtatgccggaagcactattttaacccaccaatacaagaagagattgaaaaggaaggctaatcattcatggataaaatgtttgaacaactcgatggtttattagaccgctatgcagaattacaggaattaatgtctgatccagaagtgattaatgaaaccagtcgctacatggaactttctaaggaagaagcgggcttgcgcgaaattgtgggcaagtatacgcgtttgaaggaagttttaagcgaagtgactgaaaatgaagaacttttgcgagaaacaaccgattctgaaatgacagaattagttaaggctgatttagaagaactccaaactgaaaaagcgcaattagaacaagaaattaagattttaatgttaccaactgaccctaacgatgaaaaaaatatcatcatggaaattcggggcgctgctggtggggacgaagcaagtctctttgcgggtgacctcctcaatatgtatcaacgttacgctgaatcacaaaactggcaaacagaaatcatcgatgaaacggctactgaagtcggcggcttcaaagaagttgcgatgatgattaccggtaagaatgtttattctaaactaaaatatgaaaatggtgcacaccgtgtccaacggatcccaaagacggaatcacaaggccgtgttcatacgtcaacagcaaccgttgctgttatgcctgaatacgatggtgtcgatgtcgaattagaagcaaaagatattcgggttgatgtttaccgtgcttctggtgccggtggtcaacatattaataagacctcttcagctgttcggatgacccatattccaactgggattgtcgttgcaatgcaagatcaacgttcacaacaacaaaaccgtgttaaagcaatgaagattttacaagcacgtgtttatgattattatgaatcacaaaaccagagtgaatatgactcaagtcgtaaatcagccgttggttctggggaccgttcagaacgaatcagaacgtataattatccacaaaaccgtgtgactgatcatcgaattggtttgacgctcaataagttagatcgcattatgaatggtgaattaggcgacgtaatcgatgccttaatcctcttcgatcaaacagagaaattggagcaattacaagatggcacagctcacttatcttaaagccctgaattgggcttttttatttttagaagaacgcaataaggaacgtgaagcagcgcgtttcctattattaggacgtcatcattggacaaccactcaattagtattgcattacagagatgaaatgcccgcaaacgagtatgaacaatatcaagccgatttggcggcatttgcggaggatcaaccggcacaatatattttaggtcatgccaatttttacggacgtgattttaaggtgacgcccgcaacgcttattccgcgacttgagaccgaggaattggtagaatgggtattgtcagtagcccctgttaaggatagaccactaaaagtgctagatgtcgggaccggttctggtgccattgcgattaccttggcctgtgaacgtccagattggcaagtggctgcggttgatatttcaccagcagcaattgccgtggcccaacaaaatgctcaaacattaggtgcaaaggttgacttcatcgaaggtgatttcttaacacctgttatggggcaacaatttgacgtgattgtttcgaacccaccatatatcgcagaagacgaacgctctgtcatggatgcttcggtacttaaacacgaaccagacttagcgttatttgcgcctaataatgggttagccttttatgaacgcttcgcacaggaagtccccgcatttttagaaccagaaggcgcactctttttagagtttggttatcaacaaaaagaagcgattgttcggatttttgaacaaagagaccctctgtttagcttggaagtacaaaaagatatggcaaattggtctagaatgatgcgtgtgagttacgattttaatcggaatttgttattatagaataagatgttgattaaggaaggcacataatggaaacaaaacgatacacagtcaaccaaattgaacaagcagccgctgctttaaatgcgggcgaattagtttcttttccaactgaaacggtttatggcttaggagcagatgcgactaatccagcagccgttaagaaggtctacgctgccaaaggacgtcctagcgataatccattgattgtccatgttgcttcggttgaaacggttgaacattacgcagtgacgtcaaacccggcttttaggcaattagtcaaagctttttggcctggttcattaacgattatcttgcccttaaaacatggggcatttgatgccgttgtgacgggtggtttgaaaaccgccgcttttagaatgccagacaatcaagtgacattgtcattgattaaagccgctggggtaccaatcgttggcccatcagctaatacttctgggaaaccaagtccaacgcttgctgatcatgtattacatgatttgacagggaagattgccggcgtcattgatgacgggcctaccggtgttggcttggaatcaacggttattgacttaagtgtcgcaaccccagttattttacgaccaggcgtggtaacacaagaagctatcgaacgcgtcattggtccaattatgaccaataagcacaaagtcggagcagcagaaacaccgaaagcacccgggatgaagtataagcattatgcgcctaacgcacaggtttatatcgtcgctaatccggatgactttgccgctgcgattgactgggctagccaacagggtgtgccatttggcgtgatggccgttgataccattttggaaaagcaagcaaaagtccgcttcaaggaccaattctcattaggtgaatcggttgtcacagcgagccagcatttatttgaaggactgcgatattttgatttgaatccagaagttaaactaattctcgtccaaggttttgccaaggaaggggttgggttagcgtatatgaaccgccttgaaaaatcagcagggcaaaagtattttagtaaacaacaagctgattaatggttaagtaactgcctaataaccagtgattgtgagttgcaagcgaggtacttttgacccaataatccccctaaggagtgttgtgcatgttagctaagacagatccagtaattaatgatttaattaagcaagaagaaaatcggcaacgtcataatatcgaattaattgcgtctgaaaatattgtttcgggtgctgttcaagaggcacagggcagtgtgctaacgaataaatatgcggaaggttatcccaacaagcgattttacggtggttgcgagtatatcgatgaaatcgaaacacttgcaattgaacgggctaaagaattatttggtgccgatcacgtcaacgtccaacctcactctggttcacaagctaacatggcggtttatcaagcgctattagaacctggcgataagattctagggatgaatttaactgatggcggccatttaacgcatgggtcaccgttcaactttagtggccaactttatgacttttatagctatggcgttgctgatacgaacgaacaattggattatgctagcttagctgctaaggcgcaagaagtgcatcctaagatgattgttgctggggcttcagcttatagtcgcacaattgattttccgcggttacgtgaaattgccgatcaagttggtgcctatttgatgattgacatggcccatattgccggtttagtcgcaacgggtgttcatccgagtccagtgccatatgccgatgttgtcacaacaactactcacaagacattacgcggccctcgtggcgggatgattctttgcaaggcagaatatgccaaggcaattgactctgctattttcccagggattcaaggtggcccactagaacacgtgattgctgctaaagcagttgcttttggtgaagcgttacaaccagaatttacagcttatacaaaacaaattgttgctaacgcgcaagcaatggctactgtttttgaccagtcagattcagtgcgggtcgtttcgggggggacggataaccatttgatgctattggacttgaccaatagtggtctcaatgggaaagaactgcaaaatctattggatagcgtgcacattacggttaataaaaatacaattccgtttgaaaaattaagcccgtttaagacaagtgggattcgggtcggcacaccagctattacatcgcgtggatttaaagaagctgattgtgaacaaatcgccaatttgattctagaagtgattgaaaaacacgatcaactagaagcaatgaccgcaattagtgaagcggtcttgaaattaaccgaccaatttccaatcacccaagcaaagtttttagattaatttaggaataccgctagttttttactgtgatatacgctacaataataaacagaattttaagcggaaaggagagtggctcagaggatgtttctttggagtcactcttttttgttgaaattctttccatcaaattgaatagaataggggcaaaaggtaatggcaaagttcacagttttaaatcatccgttaattcaacacaaattaacaattattcgtaacaagaatacggggactaaagtgttccgtgaagtggcgaatgaaattgccgaattaatggtttacgaaattacgcgcgatttagcaatggaagacgttgaagttgaaacaccaatgggcccagctattgaaaagcaactgagcggtaaaaaattagcagttgtcccaattttacgtgccggtttaggcatggtcgacggggttttagaattgattccagccgctaaggtcggtcatatcgggatgtaccgtgatgaaaagacgcttcaaccacacgaatatttcgttaaattaccaacagatattgaccaacgtcaattatttatcgttgatcctatgttggcaactggtggttctgcaattatggcaattgacgcccttaaaaaacgtggcgcaacatcaatgcgtttagttgttttagtagcagcacctgaaggcgttaaagcggtgcaagaagcacatccagatgttgatatttatgcagctggtttagatgatggattgaatgaagaaggttatatttatcctggtttgggcgatgctggtgatcgtttgttcgggactaaataattattgcacatataataggaggcgttcggcaatttggcgggcgcctttttggtacctaacattatattttgaacttgctaacgctttaattgacgcttaaccgactcaacaaaaaataattgcaaattaatcgctaattactttgtactttcaaattaatggtggtattatcttaattgtgttgcggtaataatttatgcgtctttttacataaatgttactgttttttaggttaattggttgtacgtagttgttaatcggagaactcgcgtgaactagtaaataagcctagggaaggagggaatcttgtgggtgataaatatcccattattagcattttgggaattcgttttaatttagcgaactgcctttcggtattattaagtgcagcaattgttttcgcgctcgtcttcttcttatcaagaaagattgcgttgaaaccaaccaagcggcagaacgtcctggaatggatgatcgactttactaatggtatcgttaagagtgctatgccgggcgaagaagggaagcaattctacctatttgcctttgttatgtttcttttcgtattcattagtaatcagttcggtttgattttccagatgaaggtggacgaagtggtttggctgaagagtccaactgcggatccgattattacaatgtccttagcgatgattgtattagtcctttcgcattatttcagtattgaacgactaggatttggtaattatttgaagagttatgttaaaccagtaggatttttcttaccgattaatatcatcgaacaatttaccaatttcttgacgctgtcattgcgtttgtatgggaacatttttgccggggaagttttattgaatcttttagttaagatggctttctcgcatggcccagccacaatgcttgtcacagcaccaattcagatggtatggcaaggattttccgtctttatcggatcaattcaagcctttgtatttgtaacattatcaatggtctacatttcagagaaagtcgaaatggaagactaaaatcaggaggaaaaaaatatgaactttttagcagcagctatcgcagcaggacttgcagcattcgcagcatcatacggtaatggtaaggtaatttctaagacaatcgaaagtatggcacgccaaccagaattgtcagcacaattaagatcaacaatgtttatcggtgttggtttgattgaagctgttccaattttatcaatcgtcgtttctttcttgatcttatttagttaatctgagtgaacaacgtttcactttaaaaattagacagtaagtcaaggaaggagtgtcaatagatgtttagtaatttaatcgttggtgcttctgcatcttaccttggagattcactatttgtacttgttgtcttcatcatcttagtcgctttagttggtaaatttgctttcggacctgtttcaaaaatgatgcaggaacgttcaaataaaatcacaaatgatttagatagcgccgctcaatcacgcgaagatgctgccaaattggccgcacaacgcgcaactgagttgaagagctctaaatcagaagccgttgagattgttaacacagctaaacaaaacggtgaaaaacaacgcgaaggtatggttaccctcgctcaagaagaagtccaaactttaaaacaaaatgctaaaaaagacatcgaacaatctcgtttagatgcgttaaacagtgcgagagatgatgttgctcaattatctattgaaattgcttctaaactcattaagaaagaattgtcagtcactgatcaaaagtcattgatcaattcctatattgaagggttggacaagcaaaatgaaactagataagtatgcagtcggacaacgctatgcaaaggccttattttcccttgcagaacaagagcaacaatttgaaagtatccatgatgagatacaagcactcgagaccattttcaatgacaatccaaaattaggcacagttttaacagatacaaccttatctgggttgaaacagcgtaacttattagaatcattgagtaatgattttagtactttaatgcaacactttttgagcttagtttttgactatcaaagaatggctgaaatgccttatattatcgcagcttatgaagatctttacgatcaacataaggggattgcacacgctaaggtgacttcagcagttgctttagacgatgatcaattagctaagatcagtcagtctttcgctaaacgcgaaggtttaaacgaagtgttaatcgaaagtgtcgttgatccagatattattggtggtatcgtgcttgaatcgaaccataaggtaatcgatggaagtgtcaaacacggcttagaccaaattaagtcgttattattgaaatagtcaatcgttgataaagaggtgaacctgatgagcattaaaactgaggaaatcagtgcattaattaaacaacaactagcaaattataatgaagaattagccgttgaagaagtcggtactgtcacttatgttggtgatgggatcgcacgtgctcacggtttagaaaatgccctctcaagtgaattgttagaattctctaacggttcatacggtgtggcacaaaacttggaaacaaatgatgttggtatcatcatcctcggcgaatacgaaaatattcgtgaaggggaccaagttaagcggacaggtcggatcatggaagtacctgttggcgatgctttaatcggtcgtgttgttaatcctttgggtcaaccagtggatggacgcggcgaaattaaaacagacaaaacacgtcctatcgaaaagaaagcacccggcgttatggctcgtcaatctgtttcagaacctttacaaacaggtttaaaagcgatcgatgccttggtgccaattggtcgtggccaacgtgaattaatcatcggggatcgtaagactggtaaaacatcagttgcgatcgatacgattattaaccaaaaaggtcaagatatgatctgtatctacgttgccattggtcaaaaggaatcaactgttagaacacaagttgaaaccttacggcgttatggtgcaatggattatacaattgttgtcgaagctggccctagccaacccgcaccactcttgtacattgccccttatgctggtgcagcaatgggtgaagaattcatgtataacggcaagcacgttttaatcgtctatgatgatttaagtaaacaagctgctgcttatcgtgaaatctcattacttttaagaagacctccaggccgtgaagcttaccctggtgatatcttctacttacattcacgtttactagaacgtgctgctaagttaagtgatgaattaggtggcggttcaatgactgctttacctatcatcgaaacacaagctggtgacatttcagcttatatcccaactaacgttatctcgatcacagatggtcaaatcttcttggaaagtgatttattctattcaggaacacgtccagctatcgatgctggttcatctgtttctcgtgttggtggggcagctcaaaccaaggctatgaagaaagtttctgggacattacgtcttgacctttcatcataccgtgaactagaagcctttacgcaattcggttctgatttagatgccgcaacacaagccaaactaaatcgtggtaaacggactgttgaagtcttgaaacaaccattgcataaaccattaccatttgaacaacaaacggtaattctatatgccttaacacacggtttcatcgatgatgtacctgttgatgacattatgcgttatgaaagtggtttaaatgattatctagaaagtaacgctaaagacttgatggatgaaatccgtcaaacaactaaattgccagacacagacaaacttgatgctgctattaaagccttcacagaaggttttgtaccagaacaagctgccgatgacaaagactcagataagtaaggggtgaattaattggctgaatctttaatggatatcaaacgaagaatcgcctctactaaaaaaactgggcaaattacaagtgctatgcaaatggtttctggtgctaagctttctcaaatcgaaaagaactcagttgcttaccaagtttatactgataagattcgagaaatcgtgacgcatctagctgcaagtcaattaattgacattgctcgtcaaaagagtagtttacaagcagaacctgctgattcaactattaaaaaggcgatcaagcacgaagtaacgttgagtaatttgttagtggaaagaccaattaagaaaactggttacttagttattacaagtgatcggggcttagttggtgcatataacagctcaatcctaaaagcaatggtccaaatgatttcagaaacgcatcaatcacctgacgaatacgcaattcttgcggtcggcgggactggtgctgatttctttaaagcacgtggcatgaacttaacttacgaatatcgtggtgtcagtgatgtcccttcttttgaagaagttaaacaaattattaaaacggccgttgcgatgtatgataatggtgtttacgatgagttgtacgtttgttacaaccaccatgttaactcattaacatctggctttagagctgaaaaaatgttaccaattaccgacttagatgtttcagaagttgctgatcaaaatctagaatacattacggaaccttccgtggatgatgccttagacgcaattctaccgcaatacgccgaaagcttaatttatggcgcaatgttagattctaaaacagcagaacatgctgcttcaatggcagcaatgaagagtgcgaccgataacgcgaataatttaatttcagaattatcaattaaatataaccgtgcacgtcaagctcaaattacaactgaaatcaccgaaatcgtcggtggtgcggcagcattagaataaaaatgcgggaggaagaaacaactatgagtatgggaaaagttgtccaagttattggtcccgttgtcgatgtcgaattttctttagatacggatttaccagatatcaataatgccttaacagtcgataaaggtaatgatgaaactgtcgttttagaggttgctctagaattaggcgacggggtaatgcgtacaatttcaatggaatctactgacggtttacgtcgtggcatgcctgttgaagatgctggacgtgcaattaacgtaccagtcggtaaagaaactctaggacgtgtttttaacgtcttaggcgaaacaatcgatggcggcgaagaatttcctgcagattttagacgcgacagtattcaccgttctgcgcctaaatttgaggaattaaatacaagttcagaaattctagaaacagggattaaggttatcgatttacttgccccttatgtgcgtggtggtaaaatcggtttgttcggtggtgccggtgttggtaaaaccgtcttaatccaagaattaatccataatatcgctgaagaacatggtggtatttctgtctttactggtgttggtgaacgaacacgtgaaggtaatgacttatactttgaaatgaaagaatcaggcgttttggaaaagacagccatggttttcggtcaaatgaatgaatcacctggtgcacgtatgcgtgttgccttgactggtttaacaattgctgaatacttccgtgatgttgaaggccaagatgtgctattgttcattgataatatcttccgtttcacgcaagctggttcagaagtttctgccctattaggacggatgccttcagccgttggttaccaaccaacattagcaacagaaatgggtcaattacaagaacgaatcacatcaactaagaaaggttcagttacatctatccaagccatttatgtgcctgccgatgattatactgatcctgcgcctgcaacaactttcgcgcatttggatgccacaactaacttggatcgtaagttaacacaacaaggtatttaccctgctgttaacccactagaatcatcttctagtgcgcttgatcctgaaattgttggccaagaacattacgaagttgcttctgaagtacaacacgtcttacaacgttatcgtgaattacaagatatcatctctatcttaggtatggatgaattatctgatgatgaaaagattatcgttgcacgtgctcgtcggattcaattcttcctatcacaaaacttccacgttgccgaagccttcacaggccaagccggttcatacgtgccagttaaggatactgtttctggtttcaaagccatccttgcgggtgactacgatgatgtcccagaagaagcattccgtcttgttgggaacattgacgctgcattagcaaaggcaaaagaaatgggctatacacagtctgaaaaggctgtcgatcaagactagaaaggggcgttaatgatggcagaagagcaaaaggtattaaccgttaatatcgtaactcctgatggtgtcgtttatgatcaccatgcttcaatgttggttgtaccagcaatggcaggacaactcggtattatggctaatcatgagccaattattacccctctagaaattggtgaaattcgtgttaagcggacggataacccagggcatgaagacgccattgcaattactggcggctttatggaagttagtcataacatcgcttcaatcgttgctgatggtgctgaacgtgcgcgcgatattaacttatcacgtgcccaacgtgctaaacaacgtgctgaagacgctattaagacggcttcagaaaaacatgattcagacgaattacgtcgggctcaaatcgcacttcaacgcgcgatgaaccggattgacgtcaaaaatcatttacaatagttattgcaagaagcctccacggcaaaagtcgtgggggcttttttgttgtgttataatacaatccaatcttcttttattaagaaaacggctaaatacagacaagggacttttctgtgtgttacaatgtccctatatccattcatagaggggcgttattgaagtgcaatcaattggatcacaagcagttgttaccattattagtcatatcggctttatcgttcttagtttttacggtctacagtctttacgacttgaacagctttttaaaccgaatcatattcgacagattcagattgtcctcatgtttacagccatcgtaatgggttatttagtgagccaattctttttagaaattatcgcgcaagcgcgcaatatcatttttttagtccaataaattagcagtcatatcggagggaaactcttggaaaaattgatcatacaaggcggacaaccattagttggtgatgtccacatcgaaggtgctaaaaatgcagtcttaccaatcatggcagcggcacttttagcctctaaaggaccagttgaattaacgaacgtgccaatcttatcagatgtttttatgatgcaagatgttttgaagagtctggatgcacgtgttaaatttgatgaacaacgtaactatctaatgattgatgccaatcaaccactaaactttgaagcggcattcgaatatgtttcaaagatgcgggcctcaatcgttgtcatgggaccattattagcaagattgggtcatgcccgagttgccatgccaggtggctgtgcaattggttcaagaccagttgacttacacctcaagggttttgaagcactcggcgcaacgattacacaaagtcatggttacatagaagccaaggctgaccaattagtcggtgcaaacatctatttagactttccaagtgttggtgcaacgcaaaatatcatgatggcagcaaccttagctaagggcacaacagtcatcgaaaacgttgcccgcgaaccagaaatcgttgatttagctaacgtcttgaataagatgggcgccaaagttttcggtgctgggactgaagaaattcggattgaaggggttactgaattaaaggggaccgaacacagtattgtgcaagatcgaattgaagcagggaccttcatgattgccgcagcagctactaagggtaatgttttagttgaagaagctatttctgaacataataaacctttattgtctaaactagctgaaatgggcgcacaagtcatcgaggaagaaaatggcatccggattatcggccctgatgaattgaaaccaagtaatatcaaaaccttgccatatcctggtttcccaacggatatgcaagcacaaatgaccgctttacaattgatggctcatgggacgagtgtcatgactgaaacagtcttcgagaatcgtttcatgcacttagaagaattacgacgtatgaatgccgattaccaaatcgaaggccaatctgtcatcttatacggtcctactgaattaacgggtgctgaagtggccgcttctgatttacgagcagcagcagcactagtcattgctggtttagcggccaatggtgagacgcttgtcacaaacttacaatacatggatcgtggttattatcacttccatcaaaaattacgggcattaggtgcacatatcagtcgtgctgattttgatgaagccggtcatcgtaaaacaactcaaaaattagcttaattagcagtgattaaagaatgatattcgtttttagacggacgtcattcttttttagtgttaatttcgtaaacgaaacttatattttattgatattaggcttgtggtataattgactattgaatatggtttctggaaggagcaacactaaatggctaaagatatcggaattgatttagggacagccaacgtcttaattaacgttatggacaaaggcattgttcttaatgaaccttcagtcgttgcgatcgatactaaaacaaaaaaagtattagcagttggttctgaagcatacagcatggtcggtcggacacccggcaatattttggcagtgcgcccacttaaagatggtgtgattgctgattttgatatgaccgaagcaatgcttgcttatttcattaataaattaaacgtcaaaggttttctatcaaaaccaaacatcttaatttgttgtccaacaaatattacatcgattgagcaaaaggcaattgtagaagctgcagaaaaatctggcggcggtaaagttttcttagaatttgaacctaaggttgcggccgtgggtgctgggatggatattttccaaccacgtggtaacatggtgatcgatattggtggtgggacgagtgatatcgccgtactatcaatgggtgaagttgtgacaagtcgttcattacggcttgctggtgatcgcatgaatgctgaaatcgcagcatacgttaaacgtaaacataacttattaatcggtgaacatactgccgaaacaatcaagttgaagattggtagtgtttggcacgccgatgcaagtgaacaactagaagtccgtggccgtgatattgtcggtggattaccagtgtcaatcacgattggtgcggatgaagttgaacttgccttgcacgaaacaatgatggccatcgttgccgctgctaaagaagtgcttgaagtgacaccaccagaattagccggcgatattattgatcgcgggattatgttaaccggtgggggtgcgctattacgcaatattgccaacctcttttctgaacaccttaaggtcccagttgtcttagctgaaaagccattggacgcggttgccttaggtacgggtgttttattagaaaatattgcccaaaaacgagcacactaaatcagaagtaagggattgtgaatattgtgtatcgatcaaattttgaagagcacgtcaaaccagttcttaaaaagattttactagtcattgttttaatgattttcgccgggttaattggccaaatgattggttttgcaatgggtggacaaaatccgtttgccgtctttttaccaagtacctggagtcacattattaatttcttgcagtaggtcaagataagtggtgattgcatgcaaaagatattaattgcacttgtgcggttttaccaaactggtatttcgccattcttaccaccgagctgtcggtattatccgacttgctctagttatatgattcaagccattcaaaaacatggcgctattaagggactgattatgggtatcggccgtattttacggtgtcacccgtttgtaaagggtggttatgatcccgttccggaacacttcacagtatttcggaataagtccgttaatgactaatgttacaaaataaggagtttcaaaaaatatgtctaaaaaagaacaacgcgtagaagtcacaattgatgatattaaccgcaacggccaagcaatgacgagtgtcaaagttggcaaaaacgaagtcggtgttattatcgaagacagtgctaaaaaacggttcgaagcaactgtcgaaggtactggccaaagcatcattactaaaacacacgacgatgctgttaacgaattactacgggagtatcacttacaccaaggttaattcttaagaattaattagctttagagtaacccggcagatttttggccgggttattttataattaagacagtttttagttgaaggagacttaacatgccaaaggaattagaaaaagtcgacgatacttcgcgtgtagattacgggattgttttttccgtcttcatgttagctttagtgggtttaatgtcgatttatgtcgcggtaacgcatgatacaagtagtgccagctcaacgcgagctgtgctgatgcaggcggcttggtacgtcattggtgggatcgcaattgtggccatcatgcagtttgattcggaacagctctggcgagttgcgccgattgcttatggcattgggatttttctcttagttgccgttttattcttttataatcgggcagtggcgattcaaactggtgctaaaagttggttctcgctagggccaatttcgttccagccttccgaagtgatgaagccggcttatatcttaatgatgagtcgggttgtgactaagcacaataccgagtatccagaacacacgattaatacggattggttattgttaggccgattattaatttggacattaccagttatggtactcttgaaattacagaatgattttgggacattattagtgttcgttgcaattttgggtggcattatcttagtatctgggattacttggaagattctagcacctgcaatggcgataatggcggccattggtgggactgctttgaccttggcggcaacaaccccagggcgggcaatcttaactcacttaggctttaaaacctatcaatttaaccgaattgatgcctggttacatccgtttgataatacggccagcacaagtttgcaattatcccaaagtttaaaggccatcgggtctggtcaattatttggtaaaggcttcaatcagattcaggttaacgtacccgttcgtgaatccgatatgattttctccgtaatcggtgaaaacttcggcttcattggttcttgtttagtcattttattgtatttcttgttgatctaccaaatgattcgggtcacatttgataccaaaaatgagttttatgcctatgtttcaacgggtgttatcatgatgatccttttccatgtttttgaaaatattgggatgagtgttggtctattaccattgaccggtattccattaccatttatttcacaaggtggttcatcgctattggggaacatgatggggattggttttatcatgtcgatgcggtaccatcataagagttatatgttcagcgaatctgaagatactttctaggagtgaaaacaattgacaatgagtaacaatgattatttttggacagaagaaatcgcagcttcaatcagacgaattggtttgactaagggtgcgcaaagtgaatttggtttaattaaatttgtagatgtcccagttgaagggcaaaagatggcacttgatatgccacttgttgcaattgaagctgaaaaaatggttcaagagttagatagtcctttagcgggtgaattagtcaacgtcaatactgatttagctgataatcccgaattattaaatgcggataatgaaaaagatgcgtggattgccgatattcgaatttcagataattagacttgacatctggcgtctgattaattaagataagaattacttaatacaagcgatgaaaagatgagtagataacttagtagcattttaagagagtccggtcaggtgcaagcggataatacgaacgattttcgaatatggtctttgagcaaattcatttggtaaggtttaactgagccgaatgcgggggttgcccgatatagcgaacgagtatcgatcctggtactttgtaaggcgattattgtgaagtagtcgtgaaattaaggtggtaacacgcaaattggcgtcctttctctcatttatttgagagggaggactttttttgtacatttttagtcaaagggagagaatgcaatgttagaactaaagcaagtcggtaaggtttaccaacgggaacaacagacatttacagcactcagtgatatttcattgaaaattgaagcgggtgaaatttatgggattatcggctattcaggcgctggtaagagtacgttaattcgattattaaacggtttagaaaaaccaactagcggggatgtcttggtcaacggtcaatcgatcgttggtttgagcgaacaagcaatgcgaccaattcggcagaagattggcatgatttttcaacacttcaatctactctggtcaaaaacaattcttgaaaatatcgccttaccgcttaaattagcgggggttggcaagaaggaacgcttagctaaggccaaagagatgttggcattagttgagctaacagacttgggtgccgcttatcctagcgaactttcagggggccaaaagcaacgggttgcaattgcccgtgcgttaatcagcgaaccggccatcttgttatgtgatgaagcaaccagtgctttggatcctaaaacaacgaattcaattttaagtcttttagctaagattaatcaggaaatgggcatcacgattgtgctggtaacccacgaaatggatgcggtacgccggatctgccaacgaatcgcagtgatggcagccggtcgggtaattgaagaaggcacaacacaagccatcttcgaaacgccacaggcagaagtgacgaaagcctttgtttcagaatcattggtgattacgcctagcgaaacagccgcttcaatcgaacagttgttgacgcgggtaccagagggcacgattgtcaaactccggtttaacgaagaacaatcgagtcagccagttattggccaattaatgcgccgctacccaagcgttgaagtcagcgtgattagtggtagtttacaacaaacgattaatggcgccctggggtatttatacattcagattcaagctagtccagacgatttaaaacaagcattatccgacttaagtcaacaaactatcgaagtagaggtgttaagacatggctaatatcaacgggtttcaatcttattttcaatttaaacaaatcgactggccaacgatgtgggaagcaacaggcgaaacggtttggctaacggctgtcagcgtcttgctagtcgcaattctcggtttcttgttagggttagttttatatcaaacaaacggtaaaatggattttatgagtcggttgttaaatgggattgtcgctttattcgtcaacgttttccgttcagtaccgttcatcatcttgatcgtgcttttgattcccatgactaaggaattgatgggtaccatgattggtcccaaagctgcaattccagcattaatcgtttcggcagcaccattttatgcgcggttagttgaattagcctttcgtgaagttgatagcggggtgattgaagcgacccgcgcactaggcgcttcaaaatggcaaattatctggcaagtccttttaccagaaagcatgcccgcactggtttccggattaaccgtcaccgcgatttcattacttggttacacggcaatggccggtgtgattggggccggtggcttggggaacttagcctacactgaaggctttcaagcaaaccaaaatacaattacgttagtggcgacaatcattattttaatcatcgtgttcatttgtcaaaaagccggtgacattatcatcgctaaaattgatcatcgttaaaacagagggagaaaagtagatgcaaaaaagatatttaagcgtactcgccgggcttttaattgttggcgtactgttgactggctgtcgcgctaaaaaagcagatcccaatacgattgtgattggcgcatcaaccattccgcatgccgccattttaagacacattaaacccgaattaaaaaaagaaggcatcacattggatgtcaaagcgttcagtgattatgtattacctaataaggctttagccagcggtgaattgaccgccaactattaccaacatattccgtttatgaaaaaggcaaaccacgataatggctatcatttagtgagtgctggtgggattcatcttgaaccactgggcctttacagcaagcgagttaaaaaattaagtgccgtcaaaaccggcgccactgtcctcgtttcaaacagtcaaactgattggggcagagtcctctcgattctaaaaacgggcggcttgatcaccttgaaaccaggggtgaaagttgaaaatgccaccttcaaggatatcgctaaaaatccgaagaagctcaaattcaaatatacgttcgaaccgaaattaatgcctgaattgttgaaaaatgatgaaggcacgctggttgccatcaattcaaactatgcagttcaggccggctttacaccagaaaaagatgcggtcgcaatcgaaagcctctcatcaccatacgtgaacgtcgtcgccgttaataaaggtgacgaaaacaaacctgcgattaagaagttaatcaaagcgctcaaatcaaaatcaacccaagcctggattaaaaagcaatggcacggagcggtattaccagttaaataatgaaggaaaggctcatatggatgggctttttttattgtgcataatttaattaagttggaaaataagcgcttaattagctatactaacagtaatggtgattaaggaggagttagtatggcgaaaacatataatatcggactagatattggtacaaattcaattgggtgggcagtcgttgatgaccagaaccacttaatgagtattaaaggaaagtacggttatggtgttcgattatatgatgaaggaaaaacagccgaagaacgtcggagttttcgaacaacacgtcgtagattaaaacggcgtaaatggcgattgggtttattaagagaaatttttgaaccacaaatcacgccgcttgataacacatttttcttacgtcagaaacaatcaagtctaagctcaaaggataatcgtaaattatatccagaaatgagtctttttaatgatcgaacggatactgatttttatgcacaatacccaacaatttatcatctgcgccgcgatttaatgactaagaataagcaatttgatattagagaaatttatttagcaacgcatcatattgtgaaatatcggggacattttttgaatgaatcaccggtatcatcatttaaaagtagtgaaattaaattagctgaaaattttgaaactttaaaccaaatatttagcgaacggtttaacgaatccatgttccaattagctgtaaatgattttgatgatttgaaagcattattgctaaatgatcaacaaagtgctagtaatcgacagaaaaaagcattgggaatgatttatgttccaaacgaaaacaaatcacttgagaagcaaaataaggcaattgctactgagttattaaaggcgattctgggcttaaaagcaaaatttaacgtcctaaccggaattgaagttgatgatgcgaagccatggacgttatcatttaactccgaaagtttcgatgaagatattgataaggtagcaaccaatattgatgatgacagccgggaaataatagcaattctacagggtctttattcgggtatcttattagcaggtattgtacctgaaaatcaatcattatcggaagcgatggtcgaaaaatatgaccagcatgctgctcatttaaagcaattaaagtcaatctacccactgttgagtatttctgataaaaaagcaattcaacaggcctacaattattatattgatgggcaagataatgctaaagcttacagcagagaagatttttatgcagcaactactaaagcattgaaatcatatcaggataacgaaacgattgctgaaattctaaagttaatcgaacttgaacaatttatgccaaagcaacgaacaaaagataatggtgcaatcccacatcagttgcaccaacaagagttagagcggattattgaaaatcaacaaaaatattatccttggttggcagaacttaatcctaacgaaagtcggcgtaaaattgctaagtataaattggatgagttagtggcatttagagtgccttattatgttgggccattgatcacgtctgaacagcaacaacaaagttcgaataaaaaatttgcgtggatgattcgaaaagcagagggtaagattacaccgtggaattttgatgaaaaagtggatcgacaagcatcagcaaatgaatttattaaacggatgacaaccactgacacctatttattggcagaagatgttttacctaaacaaagtttggtatatcaacgatttgaagtgctaaacgaattaaacggtattaagattgatgatgtaccgattacagttgaacaaaagcaacggatttttaacgatttgttcatgatgcaagcaagtgtttcggttaaaaatattcaagattatttggtttcgaagggttattttgctagtcggcctgaaattacgggattatctgatgaaaataaggttatcagtaggttgagtacgtaccatgatttgaaggcaatcttgggcggaattgttgatgaagccaacaaacaagctgatctagaaaaatgtgttgaatggtcaacaatttttgaagatggtaaaatttttgtcgaaaaattaaatgaaattgaatggttaacagatgaacagcggaaacgattatcttctaaacgttatcggggatggggccgtctttccaataaattattaaatcagattgttaatgaaaacggtcagagaataatggatttattgtgggatacgacagacaattttatgcggattgttcattcagaggaattcgataaattaattagtgctgctaaccaaacgttattatccaaaaatgatgttcaagatgtgattaatgatttatatacgtcacctcagaataaaaaggcattacgccaaattctattagtggtatctgatattcaaaaagcaatgaagaatcaagcaccaagtaaaattctaattgagtttgcccgtgaggatgaggcaaatccacgtttatctgttcaacggaaacggcaagtagagcaagtttatcaaaatattagtaaggatatccttagtgattctgatgttaaggcggaattaaaggatttaactaacacagcattagcaaatacgcgattattcttgtactttatgcagggtggtcgtgatatgtatactggagaaactttaaatattgatcgcttatcagaatacgatattgatcatattttaccgcaagccttcattaaagataattctttagataatcgggttttggtatctgcaaaaatgaatcggagcaaatctgatcaagtaccgttaaatgactatactgaagaacgatttggctcaaaaatgcgtgttcaatgggaacaaatgttacgagctggattaataactaaacgaaaatatgataatttaacgttaaatcccgatcgaattagtaaatatgctatgaaggggtttatcaatcgacaattggttgaaacacgacaagtgattaagttagcaactaacttattaatggatcattatgaagatgatgaggtccagttgattacagttaaaagtggtttgacacatcaaatgcgtgagatgtttgattttcctaaaaatagaaatttaaataaccatcaccatgcatttgatgcttatttaacggcttttgtgggaatctatcttcttaaacgttaccctaaattaacgccattttttgtttatggaagctatcaaaagaataataccaacgataagtggcgtaattttaatttccttaacgatttaaaaaaggaagaagtaatagattcagattctcacgaggttatctggaataaagcgcaaggacttgctgagttggataaaatttatcaatttaagaaaatcttagtgacccgtgaagtccatgaaaatacaggtgcactatacaaccaaacgctgtattctgctaaagacgataaggctagcggtcaaggtggtaaacagttgattcctgccaagcaggaccggccaactgcattatatggtggttactcgggcaagacggttgcttatatgtgtattgtccggattaagtctaaaaaagaagatacgtataaggtttgtggtgttgagacgagttgggtagcagaattggagagactatctgatgctaatgaacaattagctagtcttaaggcaaaattgatgcctaaatttacgaagaataagaaacaaaaaggaaaaacaattcaagttaccgaagattttgaaatcattgttcctagggtattaattaatcaacggttttatgataatggacaagaaataactctaggatcagcaacctataagcataatgaacaagaattaatgctaaataaaagggcagttaaactattaaatggtcaattatcgttagttgaggccgaaacattagcaccgcaagtttatgatgagattttaaaacaagtgatgaaatacttcccactgtatgataccaatcaatttagaacaaagttgaagatgggtaaggaacaattcatcaaattaccgtggaagaataaatgggacggtaataaattgattcatgtgggccaacaaacagtattagatcgcattttaattggattgcatgcaaatgcagcgatgagtgatctaaagactttaaagataactactccatttggaatgttacaacaacctagtggcatcacattatttttcaatacacaaattatctatcaatctccaactggcttatttgaacgacgagttgctttaagggatttataatataaaagctagcctgtcattagagtcgatgacaggctagctttttgttttgaaggcataaaaaaaggcctcataagaggctcagaatagaaaacttggtcaaaagaccttgtttgattttaactcagagtatcaaatcaatgagtatttcggttgagtgtatcaagctcaacaacgaaattatagcatgtattaaggtttaaaacaagtatgaagcaaaaattaggaggcgtttctatgggatggcgaacagtcgttatttctcaacatgcaaaagtatcatattcagggcggaaaattgtagtacaaacaaaagatgccacacatcaagtacctatcgatgatgttcagattttgttagtggcgactacgcaggcagtaattaccgcctctgcaattaccgagttgagtgaatcgggagcaaaagttatttttaccggacgagatggtaacccaagctgtgaaacgatgacggattgtcccggtaatcgcagtttaggctctattaaaaagcaagttgaatggccaacggaattacgtggaatggtctggacagaaattgttaaagcgaaaattgcaatgcagattcaatgtactcgacagttgggaaaggaagtaacgacgttagagaaggaggtacgtgccattgaatttgatgatctaagtaatcgagaagcagtcgttgctcgaaaatatttccaattaatttttgataaaacatttgtacgaactgaatttaatccaattaatgcggctttaaattatggttatagtattttattatcagcagttaatcgtgagattgtatgtaatggttatttaacgcagtttggtattcatcaccatagtggtgttagtgattttaatttaggctcagatttaatggaaccatttcgaccaatcttcgattattggatagcacaccagcgttttaatgaattgacaacggatattaaatttggactaattgaacttttgaatatcgagcttcaatacaatggacaaacaacgattcttagaaatgcactcactaaacacgtacaaaattgcttaaattttatggcgaatccaaagaatgagtttgaagtaagggtggttatgacaaatgaggtaccgaataatgcgattattggtcatgtttgatttacccacggaaacaagtgaggatcgaaaagcttaccgccattttagaaaggcattacttaatgagggctttttgatgattcaatattctgtttatgtgcgagtttgtgttagtaagcagtccgctcagtatattgaaaatagaattgctggttacacacctgcagctggacttgtccagaccctgatggtgacagaacaacagtataataaaatgcatttcttagttggaaagtctagtgatgatatacgtaattcagccgaaaggacattaattttatgaatattacttattatccgtatgaaccctttaaagttaacaatagtaaaataacgattctgagcacgagtagtccgtctgtatatactaaattaatcgcaggggcctctggtcaagatgatacacttcatttaagcgatgaccattatcggttactagaatatatcaaagggatgatttggattggtgaaatttcagcggttgatttaaatcatctttttcaaaataagttgatcaaaaaatttacagccgatctaacggatgaacaacgacaaaaggtagttaatctgaataatgaattacgagccactattttagaagccgcgtttatgtatgaattagctttagatattgaccatgagttagatttgcaaaagttaattaaattttgcaatttaaaattttcgaatgatgttcaagatgatccatatggtataatagaaagcatagtacaaactgctatagagttacaagaaacaagaattatcacgttgatcaacgtttcgcactatcttagtatcaaccagtttaatgaactggtaagactagttgcgacattggatgtgaaactctttatcattgaattttcagaattggcaacgcctgacaggtaccaagaatgctgttattatcacattgataatgattatgttgaatggcgttacgaataaagtgagtatttgatgaaaaaacatcggttttagaagagtatcaaatcaatgagtagttcaactaaacgtcatcgtgtccgctcagcaagcttgttttagaagagtatcaaatcaatgagtagttcaactgagcggtgtggaaattgttcacgcaatacgttttagaagagtatcaaatcaatgagtagttcaaccagtacttaggtagttcttctttcgaactagttttagaagagtatcaaatcaatgagtagttcaacatttatactttcttttgtgttagttggattgttttagaagagtatcaaatcaatgagtagttcaactatggtggggccatttagtttcgggtgtcggttttagaagagtatcaaatcaatgagtagttcaaccttagtgaagcctactttatcacagctgcggttttagaagagtatcaaatcaatgagtagttcaaccaatattgctgggaaaaaaccggcggatttgttttagaagagtatcaaatcaatgagtagttcaacacatgttatattagtattatggattgcccggttttagaagagtatcaaatcaatgagtagttcaacttaaggcacaggggctagaaatacaaggcagttttagaagagtatcaaatcaatgagtagttcaacaaaaagttgaagctattcaaatagcaggatgttttagaagagtatcaaatcaatgagtagttcaacataaactgttttgagtgttcttgacggactgttttagaagagtatcaaatcaatgagtagttcaacatcatgatctagaatactgatatcccttaagttttagaagagtatcaaatcaatgagtagttcaacaatgcagcaatgaatttagttgacgcaatggttttagaagagtatcaaatcaatgagtagttcaactgacgcaatggtaagaggtgtattgcaagcgttttagaagagtatcaaatcaatgagtagttcaacctaatagcttgttcgttacctcttctgatagttttagaagagtatcaaatcaatgagtagttcaactgttgttgcttgtcagtaacaacgccgtcagttttagaagagtatcaaatcaatgagtagttcaacacattaactatatcgtcacccctgacttaggttttagaagagtatcaaatcaatgagtagttcaacataccgttgaacagataccgttctatacacgttttagaagagtatcaaatcaatgagtagttcaactgaatggcttacgagttaataccgaacgaggttttagaagagtatcaaatcaatgagtagttcaactttgacgacgttctccacgttcataatcaagttttagaagagtatcaaatcaatgagtagttcaacttataatagaattaagcaataaggaatacagttttagaagagtatcaaatcaatgagtagttcaacttgtatcttgatttatagcgttggctttcagttttagaagagtatcaaatcaatgagtagttcaacttattcccgtaaaacataatgcctgttttagttttagaagagtatcaaatcaatgagtagttcaacttctggtcgatgaagcacatcattcgttgggttttagaagagtatcaaatcaatgagtagttcaactatctagccgacaccggttcctcatggcaagttttagaagagtatcaaatcaatgagtagttcaactcaagaatgccattgacgttacagcggatagttttagaagagtatcaaatcaatgagtagttcaaccagatgagccttccaatgaagaaccagccagttttagaagagtatcaaatcaatgagtagttcaacaaaaggtggttacatattatgacaaaggtaggttttagaagagtatcaaatcaatgagtagttcaacccgttgcatgtttgttctttctaactgtatgttttagaagagtatcaaatcaatgagtagttcaactgatagaaatcaacgagttagctaaaacaagttttagaagagtatcaaatcaattagtagttcaacatagcagacaattagaaaagctcaactactgttttagaagagtatcaaatcaatgagtagttcaacaagaaaaggacgtgctaaacatgaaactatgttttagaagagtatcaaatcaatgagtagttcaacccatttcttaatcagagtatcgcgtaccatgttttagaagagtatcaaatcaatgagtagttcaacaagttttcgtagaataactgttgttcatctgttttagaagagtatcaaatcaatgagtagttcaactgcaagaaggtcaagtttactcaattgattgttttagaagagtatcaaatcaatgagtagttcaactcaaattaatcaaagggggcgtttaaatgggttttagaagagtatcaaatcaatgagtagttcaacaaaacagcttggcaaatggctaaaggatcagctttagaagagtatcaaatcaatgagtagttcaacaggaaaggagctaatcgataatctatgagtgctttagaagagtatcaaatcaatgagtagttcaactaatttaactagaataatattataaggtaggctttagaagagtatcaaatcaatgagtagttcaactagcagccctattcgctgatgaagattttagctttagaagagtatcaaatcaatgagtagttcaaccgcgtttggttacaaagtggcatgacctgcgctttagaagagtatcaaatcaatgagtagttcaaccccagtcatttattgtcgcatctaaaactggctttagaagagtatcaaatcaatgagtagttcaacttaaaaagctatggagaactaaaggcttacgctttagaagagtatcaaatcaatgagtagttcaactgagagtaatttcatataattccccaatttgctttagaagagtatcaaatcaatgagtagttcaacagtttctggtaaggaatatacgcgttatcggctttagaagagtatcaaatcaatgagtagttcaacaagatgctggcatgtcagatgcttggattagctttagaagagtatcaaatcaatgagtagttcaacttaatcactggtatcagtgatgacaactatgctttagaagagtatcaaatcaatgagtagttcaacgcgcaggactaaccccttgttcttggagatgctttagaagagtatcaaatcaatgagtagttcaactttgaccagactaatccgacgtttatccgggttttagaagagtatcaaatcaatgagcagttcgatcacgctaataatcgtaaattcttttaatttaagtttggggagtacctttaatggggtactcttttttattagatttaatgcatatccttgattgatatttcacgattcgactattgaaaagcgttctcatttagcttagaattaagtcagcaacaacgtgctataatgcgatttttggagggtcagtaatgtctaaattagaaattatcgatttacacgtcggaattgacggtaaagaaattttaaaaggtgttaacttagaaatgaatacgggtgagattcacgccatcatgggaccaaatgggaccgggaaatcaaccctttcagaaaccatcatgggtaatcctaaatatgaagtacttcaaggtgaaattaaattagacggtcaaaatattcttgaaatgccagttgatgaacgagcacgcgctggcttattcttagcgatgcaatatccatctgaaattcaaggtgttacgaacgctgaatttatgcgggctgctatcaatgcgcgccgggctgaggatgatcaaatctcaatcatggccttcttgaaaaaattagatcaacgcatggctgtcttagatatgacagaagaaatgtctgaacgttacttaaacgaaggcttttctggtggtgaaaagaaacgaaacgaaattctacaattaatgatgattgaacctaaatttgctattttagatgaaattgattctggtttagatatcgatgccttacaagttgtttctaaaggggtcaacgaaatgcgcggcgataacttcggttcattgattatcacgcattatcaacgtttattgaactacattgtgcctgatttcgtgcacatcatgatgggcggtaaaatcgtgacgactggtgatgcatcattggccaaacgtctagaagacgaaggttacgccggtattcgtgatgaattagggttagacattaaattaactgacgatgaaagtaaatagggggcagctttgatgaaaaagaaattagccatcacacctgaacaagttgcggctttttcaattgcccatcaagaaccagattggtttgcagccttacgccaaacagccttaggccaaattgaaaagctcgacttacctattttcgaaaagattaattacaaacattggccaattatggctgcgagtgcgccaactttgacaacttctgtgactgatacattaccagaaatggtcgctgatttaacggcggatcaaccttatgtgattcaagttgggcaaacgattgctaaattaaatctacctagtgaattagcagaacaaggggtcatctttaccgatatcttcactgctttacaagactatcctgaattggttcatgaatactatatgcaagtgacggttaaaccggacgaagatcgtttgacggcctttcacacagccttgatgaacagtgggatgttcttgtacgtgccgaagaatgtggtgattaagcaaccgattacggcttattatgtacaagatagcacgcaagccactgattttatccatcacgttttaattgtggcggaacaaaatagtgaatttagttatctagaaaacctacaaacaatgggtgatcacaagaacctagctaatatggtggttgaagtgattgccaaggataatagtcacgtgcatttctcagccgttgatgcgtttggtaagtctgtcacgacttatctgaaccgtcggggacacttaatgcgtgatgcccggattgattgggcattgggcttcatgaatgacggcaatatcattggcgactttgattctgatttggtcggcgatggttcgcatgctgaaacgaaagtggtcgccatttcaaccgggaaacagattcaaggaatcgatacgcgggtgacgaatattggccctcgttcaatcgggcatatcttgcaacatggcgttattttagaagatgcgaccctgacttttaacgggattgggcacatcatcaaaggcgctaagggtgctgatgcacaacaagaaaatcgggttttgatgttatcacgaacggcccgtggggatgccaatccgctattattaatcgatgaaaatgacgttcaagccggtcatgctgccagtgttggccgtgttaatgaacaacaaatgtactatctcatgagtcggggcttgtctaaagaagttgcacaacgcctagtcattcgtgggttcttaggcgccgtcctgactgaaattccggacaaaaatgttcgtcaacaattaacggacacgatcgagaggaagttaattgatgggcaaaagtctgaacactagtcggcaagattttccaattttagaacaattggttaatgatgaacccttggtttatttggataacgcagcgacaacgcaaaagccacaagcggtgattgaccaaatagtgagttactaccaacatgataatgccaatgttcaccggggcgtgcatacgttggcggaacgggcgactgcgcaatacgaagctgctagagttaaagttcaacaatttatcaatgccgcttcttcagcggagattgtcttcacaaaagggaccacgcagagtttaaactggattgccggtagttttgggccaacagttgtccaagctggcgatgaaatcgtcattagctatatggaacaccatagcaacctagtcccttggcaacaacttgctaaaaagacgggggccaaactacgctacatcgatctattgccagatggtcagttagatttagacgctgctaagcaggtcattggtccgcgaactaaaatcgtcagtttagcgcatgcttctaacgttttaggcgttgtcaatctagtgaagacgattgcggcactagtccatgcccaaggtggttatatggtcgttgatggcgcacaagctgttccgcatatgccagttgatgtgcaggcgctggatgcagatttttatgctttttcagggcataaaatgttgggcccaacaggaatcggtgtcttgtatggtaagcgggccttgctcgagcagttaccacccgttgaatatggtggggagatgattgatttcgtcggcttacaagaatcgaccttcaaagaactgccttggcgcttagaaggtggaacccccaatattgctggtgcgattggtttaggggctgcgattgattatctgaatcagattgggatgaccaatatccaggcacatgagcaggctttagtcgccgaagcattaccggccttacaagccatcgacgggttaacgatttatgggccgcaagaagctagtcagcgaacgggtgtgattgcttttaatctggataatctccatccgcacgatttagcaacagccctcgatatggaaggggtcgctgttcgcgcggggcatcattgcgcacaaccactgatgcagtggctaaacgttgcggcaacggctcgcgcgagtttctacctctacaatacgtcagaagacgtacaagccttagtggccgcgattcaagcagcaaaggagtttttccaaaatggcactctctaaattagataacttatatcggcaggtcatcttagaccattcgcaacatccgcaccatcatggtcatttagacactgtcgatcatgaaattgaattacgtaacccaacttgtggcgatgtgttgcagttggagattgcgcttgaagataaccggattagccagattgctttttcaggggaaggctgcaccatcagccaagcctctgccagcatgatgaccgatgcggtcttgcataagacacctgctgaagctgaagtgatgatcgaacgcttttcagacatggtgattggcgatcgcgatgaagattggacaattctagaagatgcggccattttgcagggcgttcaacaatttccagcgcggattaaatgtgccacgcttgcttggaaggcactccacaaagcactcaatagtgatactaattcagcgacaacgggtcaaattgtgaaccatgcagaaacggagggaacagattaatgacagaagagacgacgatgccccaatttgagaactatgattacggctttagcgatgatgttgaacccgtcttttcaaccggccggggcttaactgaagatgttgtgcgcgcaatttcgcacgagaaaaaagaaccccaatggatgttagacttccgtttaaaatcatttcatgcttacgaaaaaatgccaatgcccgattttggcccagatttatccggtcttgatttagagcatatgctgtactaccaaaaggcgactgataaacaataccgcgattgggaagatgtccctgataaaatcaaggatacttttgaccgcttaggggtcccagaagctgaacggaaatatttggctgggtccagtgcgcaatatgaatcagaagtggtttaccacaatatgcgcgatgaatttgaaaagctcgggattatctttaccgatatggatactgccttgcgcgaatatcccgatatcgtgaaggaatacttcagtactttggttaaaccaaccgacaataaattttcagcgctcaactcggctgtttggtctggtgggaccttcatctacgtgccaaaaggtgtgcggacagatattccaatccaatcatacttccggattaacgctgaaaactcaggtcaattcgaacggacattgatcgttgttgatgaaggcgccagcgtgaattacgtcgaaggctgtactgcgcccagttattcaagtgatagcttgcacgcggcggtcgttgaagtcttcgttaaacgggatgcttattgccggtacacaacgattcaaaactggtcgaagaatgtttatagtttggaaaccaaacgggcccaagccatggaaaatgcgacaatggaatgggtcgatgggaacctgggttctaaaatgactatgaaatacccaagtgtctacctcgatggcgaaggcgcacggggcacaatgctatcaatcgctgttgccggcgaaggcgttgaccaagacagtggcgcccggatgattcacgccgcaccaaatacgtcgtcatcaatcgtttcgaaatcgattgccaaagatggtggcgccgttgattatcgaggcactgttcgttttgaacgcgacagtgacggttcttttgcccacgtcgaatgtgatacgattattatggatgataaatccagttccgacacgattccgtataatacaatcttaaacggaaatgtctcaatggaacatgaagccaaggtctctaaaatttcagaagaacaactctattacttgatgagccgtggtatatcggaagccaaagcaaccgaaatgatcatcatgggcttcgtcgaaccattcaccaaggaactcccaatggaatatgcggtggaattgaatcgattgattagctatgaaatggaagggtctgtaggataataaaaaaaggctagtgacctaaaacttttaatgtagccatcaaaaaagccctcatttgagggctttttttcaggttattaacgtgccatgttattgatattagcaaataatttaatacagtagagcgcacttagtccaactaggacataaacaattcgtgaaataatagctgcttggccgccaaatagcatagccacaaggtcgaatttaaataaaccaacaagtagccagtttaaaccacctacgattaataaggcaagagcgatattgtctaaagtcttcatattcaacacctccttctttaacttaaaaataacatcttcaagaagctggaacaatgtaattgctcacaatgtttattggagcaattttaaaaatctagtgtgattaagatgcatgtcaagaatgttatttaatttttttctgttgtaagatattagcagtaataaaatgtcaggagcgagttgaatgaaacactttgaaccagcacggattaatgatcagtattctttaacgctaaatgagactgggaacgtcatgttaactaaagtgggcgtcggtatcgtggggcagatgagttattattacacacgtaacgatttaccgttgtttatttgtcgtcacgaaccaagtgtgaatctgagaacaattcatgacgtgatggttcaattggacgcccagctggcagaaatggtcggttgcggctgcttaatggttggtggtcagaacgtggcacaacaatgtaaaatggtctaattaaaagaggacacactatctaatggatagtgtgtcctcttttgtagaaagctatttatcttgtcaaatgtaaaatcggatatggtttatcaaaaccatcgcgttcactgcgagatgcaacggtaaagccgtgctttaagtagaacgttttggcacgttgattttgttcatttacatcaattttattaatctgttgattattgattaaccaatctaagatttgatggccatacccgccaccaatgtaatgaggatcgagaaatagcatctctaattcttgagcgttggtaccactaaacccgattggctggttatctagtgaccagattctgagaaccgtttgatccagaaatcgcggaatttgtgttttataaaaggttacgtcttcaggttgcaagaagttatgcgtcgctaaaacggaccgttcccaaatatcgaggactagcgcatagtctgaggtggtggctaattgattcgataacattttatgacctactttcagtttattgatagattaaattaaatgattctcgaagtcaattgtgtgactaataatgttctttttagttatttttaaaaatagcaatactgcttaatcatttcggttaggcagtatttttttattggggaaatgcgctgatatataatgatgagagaacgacatcattttatgcagttttatttaagattgtcaactttatgaattgtgagagaatgatgaaaattatgaacgaaattttatcaatttaaatatttagcggcattatccgaatgaattccgtatatttgtgataaaatattagccaatgaacggttattaggaggcggactgatgtatcatattaaaattaataatatgcagtttcattcgcatattggtgtttttcaagctgagaaggatctagggcagcgaattgaaattgacttaaaggtggcaatcatgacgccttatcaaggagacgaattaacggatacggtcagttatgcggatttctatgaagtgattgcccaattaatcgtcaaatcacgtgctaatttggtcgaaacaatcgcgcatgagattatccaggcaattcatgcgcttgatactgagcgaattggcttagtcgcggttaaggtgcgtaaaattgcagtaccgattgaaggcatttttgaccatgtcgaaattgagatggagggttgagtttgattaatcaagtttatattagttacggcagtaatatgggtgatttaaaggcgaatattaatcaggcgctagcccttttggcagctgatccgaaaattcaaattgaacggcagtcggcagcgtttaatgatccgcaaaaatatcagatgattaacgaattgattgcccaacaaaaacgccccctttatcggggagtcaacgatcaatatcatttatcggctagtgccctcgtatttaaaaataatcagttgttgatggtacgccatccatacttgcagcaatggttattaccagcggggcatattgaactgtctgaaacgcctggtcaaaccgctctgcgggaattactagaggaaaccgggctagtcggggaacaagcgcagttgatggatgctaatttaattgcgattccggagaatcctgtgaaaaagcaagcagcccacatgcacattgattgccgttatttaatcactgcaaaagagcagccaagcacatcagccgagctccctaatcgatgggttgcgcaagatgcagcaccagtggaatttcaaccctattttaaacttcaataaaccagatattttttaaaaattaaaagcattattactaggagaaacaaatggcgattacaataagacatgaagaagaaaaagattatagaatcgtggaagaaatcacacgagaagccttttggaatttatattttccaggagcagtcgaacatttactagtgcacaacatcagaaaacatcctgactatattcccgaactgtcgtatgttattgaattagatgatcaaattatcggtagcattttctacacaaaggctaaagtgatcgataaagaaggggtggcgcatccgattattactttcggaccagttagtatttcaccggcgtatcatcgatagggatttgggcgtatgttgattgagcactcacttgctgaagcgaaaagactgggctttaacgcaattattcttggcagttttacgtatcactatcatccttatggatttgtggggactaagaaatacaatatatcgatgcctgatggtaaattttatacgggggtaatggccttaccgttatttgaaggtgcattagatggtattagcggcagcgttcatttttcagaagcgatgtatccagatgaatcgttcttagatgattttgatcaaacatttccaccaaaagaaaagcaaattctcccacatcaagcagactttgaaaaagcggttagcgaaattgacaaccatgactatgattaaataaaaactgatgaacaaattattttagtggtaaaaattgaggtataaagatgaaaattgaagtggtggcttaccgcaaagaatgggtagctcaattcactagtgaacgagagcgcttaaaagcagctttgccgatagcttttttacaaatttttcatattggtagtacgtctgtaaaagggcttgctgctaaaccaatcatcgatcttttattagtggttgataacttgcaggatttagatgatcatcaggtgatctttgaacagctgggttatgaagtatgtggtgagtttgggattcctgggcggcgttactatcgcaaaggtggcgaccaaagaacgcatcaaattcatgctttcgcgtataataacttatatgagattgagcggcatttagccgttagggactatttaagaacccatactaatgcagtagcgcgttatgcagcggttaagcgggcggttgcagagttttcaggaaacgatatcgaaaaatatggtgattttaaagaaacgtttgtgaaacagttagaagaagccgccatcaaatggcgcctacaaattaaagcaaacaatgaaggtcatcagctgtagcgtaactccaaaattggcaaaggcggtgcaagctgattttacgcaagcatatcagaattaagtttgattaataatgatgtgaaaatctttaaaagaggggctaaataagtggagattagacgctatcagccgggggattgtcaagcagtcgcagagttgttttataagacagtgcatacagtgaatgctggcgattatacgaaagcgcagttggctgtatgggccactggtgagcctgatttaaagcagtgggatcaatcgctgcaatcacatttcagtgttgttgcacttgaaaatgataacctgattggttttggagatattgatcaagctggctacctcgatcggttatttgtccatgccgattatcaaagaagaggcgtagcgactgctatctgtcatcagctcgagcaggctgttgcaggccgagttatcacgcatgcttcgattacagccagaccgtttttcgaaagtcggggctatcaggtgattcgagaacaacaagtagcacggcaaggtgttttattgaccaactttgttatggagaaagagcaatcatcagtagactgagtcacttgatgatgattttagtgaataaccgcttccatccgtgctataatgaagccataattgaataacgcatctggggtgcctaagagctgagattatacccattgaacctgatatagttaggactagcgcagggaaatgtcgtgtcgtttgttgattaaacgtgcttattttggtacccgtcaatttttaattggcgggtattttgagtgcttgtcaagtggccccagaagtgaattgatttcaattcgtacaggaggggcaacatgtcatttacaagtattgttcgtaaggaagctgcaccatattggcaaggtagtttacgtcatccgtttatcgttcaattgcaagcggggacgctgccagaagaaatatttcggtattatttgattcaagatcattattatcttcgtcatttcagaaagttacatcaaatcgtcgccgatcactgtcaggatcaagaattaaaagcgttgatgacactaagcgcaactggtttgaaagatggtgaaatgatcgttcgggaataattctttgaagctttaaaaataacggctgctgaggttcgagcgacgcccattgcgccgacaactgatcactatgttgctcatatgtatcggcaattatttgcggataaccccgccatcgcggcggctggtttatacccatgtgcttggttatacggtgatatcggaatggctttaagtcaacagccggcttcacctaatccatattatcaacgctggattgaaacctacacgatggctgaattgcaggatgaaattcaaatgatgggcactgttttaaatcgcttgtatgcagccagttcagcggaagatcaggttaaaatggtgcaggcgtttgttcgtagcagccaattggaatatcatttttgggagatggcttatcgtaaggaacaatggttgcgtggggacgaatacgatgaataatagacgaacgaaacgattaaccatccttgcgatgatgattgcactagatgtcgtcttatcgccgttatttcgcattgaaggcatggcaccgatgtcgagtgttctgaacgttacagcggcagtgttgatggggccaatttatgcaaccgtgatggcgttagtgacggccgttttaagaatgatgttactggggattccacctttagccttaatgggggctttttttggcgctttattagctggccttggttatcgctatggcgggcatattggctgggcaattgcaggcgaaattttaggaacgggtttaatcggctcgttactttcttatcccgttatgatttggtttaccggtagtgctagtggtttattttggttcgtttacacaccacgcttttttggcggcgccatttcgggcagcctaattgctgggttattctggcttaaattaaaggaaaccacgatttttataggtaataaaaaagaagaacaacgttaaatggcgttgttcttctttaatttgtaaaagcttatttgaattgttctgttttagttgttgttagccagaagggttgggatgtgaccttgaagtgcatatcaaatgcgcgactacccatttcttcgccatcgacttggccaaattctaacgtttgggttcgaatgacaagatcatcagttctaaaatgatgaaccgtcttatagcgggtgtgtttgcccgttagcatcatgatgaataggtagcagaagaagaagaaaacgttcaacttttcaatcaccacgaggtcgagtttttgatcatcgacgcgggcagaaggcatgatgggaacaccactgccaaagtaaggatgattcgtggttgtgacaagaaaaccacggctaaagtttttaacggatccgttggccttgacggtcacttggaaagcatcttgcgatgtaaaggcctggattagcgagaagacgtaagataaggagccgagatggcatttatttaagaagcgtttgcttttagagttgttagtgatactgacgacggaagcgtcaaaaccaataccgacattgttgacgaaataaccagtctcgttcttgagagcatcgtgatagacacccaaatcgatattgacgggggcggtagctgcaagaatctgttcgagcgcttgtagtggatcgctatttaagccaatcccacgcgcgaaatcattaccagagccacaaggtaaatatgcgatggggatatcatgtttaccggcactttggaccccattaatggcttggtttaaagtaccatcaccgccgacaatcaacaaaacttgattcgttcgtttaaaacgggcaaattggtaggcaatccgagtggtatgaccgggatagctagaaatttgtaattcatatgaaataccgcgttgcttgagggcagtttcgatttgcggccaaatcttctgagcttggccagtaccagcaacttgatttaaaataatataaaaatgtggcgtatcagccattcggataccccctttcagaaaagatattcggtgtatattatagcgggaaatgacaagttttactacctaaatttttgataagaattaaaaaaaagggcgatacaaacgtgagtttgtatcgcccttaaaggttttattcattactttgaatgatcattggtaaaatcatcggatggcgttccgtcttttcaaataagaaatcttgaaggccatcgatgattgcttctcggacttggttttcagtgaccttgtcgttagcattgaacgtgttgacgatcattctgaaaacccgtcgttgggcttcgctgatcaattcaccagattcacgcatatagacaaacccccgtgaaaggatatcaggaccggcaagaatgtttttctcaccgaagttaatcgttgcgacaaccacgaccaagccttcttcagaaagcattttacgatcgcgaaggacaacgttaccgatatcaccaatcccgttaccatctacataaacatcgtcggcactgaaatggccagcaacatgtgctgagtcagcggttaaggctaagacatcaccattttcaaggatgaaacaattatccggttcaacgccacattgttgggcgagttcggtatgaatcttttgcatccggtattcaccatgacaaggcatgaagaacttaggtttcattaaacgcaacattaatttttgttcttcttggccaccatgaccagaagtatgaatgttgttgaccttaccatgaataacttcagcgcctgcttcagaaagcttattgataacgtggttaacgctcgttgtattcccaggaattggattacttgagaaaacaactgtatcgccaggttggattgaaatctgacggtgagtaccgttagcaatccggctcaaagcggccattggttcgccttgagaacccgtacagataatcatcactttatcagcaggtaatgagttaagttgacttgcatcaaccagtgcttcatcaggaatatttaaataacctaattcacgaccattaacaacggcagcttccatgctacgtccgaagaccgcaatctttcgaccgttagcaatcgctgcatcggttgcttgtgagacccgtgaaatattagaagcgaaagttgcgaagataatccggccttcaatccgttccacaatgtggcggattgaatcgccaacaaaacgttctgatttcgtgaagttaggcacttcagcattggtactatcagacattaagcaaagaacgccttcttcgccaagacgtgccatcttttgaaggttaggggaaggttgattaccaactggtgttaagtcaaacttgaaatcaccagtttcaacaacgaccccttgaggtgtatgaatcgcaacccctaatgtatcaggaattgaatgggttgtccggaagaaatcaacactggttttgcggaatttaaggacggtatcttcgtttatttcatgtaattcagtagaccgcaaaaggccatgttcttctaacttaccgcgaattaaagcaagagctaaaggacctgcataaacaggaacgtttggcacttgttgtaaaaagaaaggtaacccaccaatatgatcttcatgaccatgagtaatcacaagggctttgattttttgttggttcttttgaagatattgataatcggaaatgacatagtcaatccctaataattcatcttctggaaacttgatgccggcgtcaataacgataatttcatcttggaattgaacaccgtacatgttcttaccaatttcgccaagaccccctacggcaaaaacggctgtttcattgttttttatattgagtttcatttatttagaactccgttaatttgaagtcttctgattcttgttcgtaagctaagtgttcaccagtaagctcttgtacaaattcaatattgtagggtgtattgtcttcaacaagttgacgtgcttcaacggcactgttagcttcaagatagagggatttagttgcctcgcgtagagggctttgtgttttgtctgcttggaaaagtactttataaatcaattgtaaaactcctttgatattcatcttatttttaaacgaaagtttaaccgtccagaggttgattactcaacatttaagaatattttagcatatcttttgtttaaagtatacattgagcaatggcctcgtaatagcgagtttactctaattcggttataattatgacaaccgttacaaatagaaagagggggttgccatgttgatttggttattactactagtcttaattggattggtgggcggtctagcttggttcattcatcgtattcgtcgacaaagagccatgcggattttacaaagtagtagtcaagaaacggtagacgagattgtcaatattgcgtatcaaagattattgagcgtccaaccgcaattttatacgaaacaagcaactttgactgccaatttaccaacagaagtttggggcgggaatgtgatgttgtttgagtatcgcgtaaatgttttacaaacggatgtgtcgttaaaaccgattacagaaacgttagcgcagactttaaatgaggttgcagatgagcgacgaattgcctccgttaatcctaaatatccagcgttagtgattacggatgcttggttattggaccaggagtaccattttgatgtggcgtttattgtcaatcgggaaacgattgaatacgtcaaggatatggcacgtgtgatggactaaatttgaaacaagaaggagttagcacctatgaaattaatgtggcgctataccattcgctataaaaaactactattttggaattttatttgcgtatttgggtttattttaattgaactaggattaccaactttattaggacaaattattgataaaggtatcaaccgccatacggtcgggccggtttggcaatatgggactttaatggttgttatttccttaattggcttggtggggttaattggcctagcctacacggggagtcgcttaaccactaatttaacacgtgatatccggaacgatatttttaaaaagacgatgcaattttcacatcatgaatatggtgaatttggcgtgtcttccttaattactcggacgaccaacgatgcgtttcaagtgacgcaattcatggtgcaagtgttacgaactgggtttatgaccccgatgatgatcgttgccagtgcgtttatgattgtgcggacgagtctgtcgttatcatggattgtttttgcagccattccgattttattagttggggtggtcatcattggttggttatccgaaccaatgtctgcagaacaacaaaaaaacttagatgcaatcaatttaaacttacgtgaaaatttaactgggattcgtgttattcgcgcatttgtgcgtgaaaaattccagagtatgcgttttagaaaagttaatgaagcctacagtcagagttcaatcaaactctttacattagtagccctcgcacaacctggcttttcatttatcttcaatattgtgttcgtgttaatcatttggcaaggggcggttcaaattaacacgggtcacttggcagtggggacgttaattgcctttattgaatacattttccacgtactattttcattcatgctcttcgcaagtgtcttcatgatgtaccctagagcggctgtttcagcagaacggattgaaaaagtccttaattcacccgtagatattacggatgatgatcaggggattcaaaccacgactacccaaggcgaattggcttttgaaaatgtgtcgtttgcttatcctggtccgacagaaagtccggtcattcgggatgtcagttttaaagcccatccaggggaaaccgtcgccttcatcggtagtacggggagtggtaaatcaaccttaatccaattgattccacgctttttcgatgtgacacggggtcaagtgatgattgatggttacgatgttcgtgattatcaattgaaagcattacgccaaaaaattggttttattcctcaaaaagcagtcctctttaccggcacgattgcggataacttgcgctatggtaatccggaagcaacggatgctgaattatgggatgctttaacgattgcccaatccaaaacatttgtggcggaaaaaccagagggactccaaacgtatttggccgaagggggcaacaacttatcaggtgggcaaaagcaacggctagcgattgccagagcaattgttcgtcggccagacatttacgtctttgacgatagcttctcagctttggattatcaaactgatgcggctttacggggcgctttaaaatcgattacgaaagatgcgacggtcttaattgtcgcccaacgtgtagggacgattatgaatgcggatcgaattgtcgtcttaaatgaaggccaagttgtgggcatcgggacccacaaggaattacttaaaacaaatgaggtttatcgggccattgccgcctcacagttatcaaaggaggagctcaatgaagaatattaaggtgctcaaacgcctgatgcgctatattgggccgtataaaataacgttctggtcagcaattactgcaacggtgatttccgttttagcgaatgcgctatggccatttatcatgggactagcagtgactgaaattagtcaaaacttagcgcaacacgtcgccgttaactttagttacattactaaagtgattgcgatgattctcagctttgcattactttatcaaacgatgatgtttctgggatcgtttttaatgacgcgtgccgtccaacacgcaatgcgtgatttacggcgggatatcaatctacagatgaacgctttgccagtccgtttctttgattcacaacaacaaggcaatatcttgtcgcgggttactaatgatgttgatgcaattaccaatgccttgcaacagagtttaatccaagtggtgacctcaattttggggatcatcatggcggttgtcatgatgttgacgattaatttatggatggcattactatccttaattatgattccgacctcacttttgatttctaaagcaatcatcaaaaagtcacaagtttacttccaagggcaacaaaataccttgggtgagatgaacggctatgttcaagaaaactatggtggcttcagtgtcttgaagttgtatggtcaagaagaacgagcagttgatgaatttgcagcgattacggatcgattgactgaatttggcttcaaagcggcctttatttcagggattatgatgccattagtgggtttgacgactaacttgacttacgctgggatggcaaccttgggtggttactatgtcttgcacggtgtcattacggttggtaacttgcaggcctttattcaatatatttggcagattaatcaaccgatttcgcaaatcacacaattatccggtgtgatgcaagccgctgccgctgcgacacaacgagtttttgaaatcttagatgaaccgattgaaccaactgatcaagaaacggctgaattaccggctgatgttcaggggaaagttgaatttaaagatgtcagctttagctatgatccagccaaaccgttgattcgtgatttaagtttcactgctaatccgggcgataaaattgcgattgttgggccaactggggccgggaaaacgacgatgattaatttattaatgcgtttttacgatgtcagttctggtcaaatcctgattgatggcgtcgatacccgccaattgagtaaacagacagttcgctcactctttgggatggtgctgcaggatgcttggttgtaccacacaacgattacggaaaatattcgttttgggaagctagatgccactgaatatgaagtcgtggatgctgccaaaacggctaatgttgatcactttatccatacattgccaaatggctatcagatgacaattgatgaagaagcggataacgtgtcgttaggacaaaagcaactcttaacgattgctcgggcagtgattgctaatcctaaaattttgattttagatgaagcaaccagttcagtcgatacgcgcttagaaagcttattacaaaaggcgatggaaaaagtgatgcaaggacgaacaagctttgtgattgcccatcgcttatcaacaattcgggatgctaacttaattttagtgatggatcacggtcaaattgttgaaaaaggaacgcatgatgacttattagccgctaatggtgtttatgctaagctttataacagtcaatttgcagaagcaaaattaaatgcatagaaaaaaggttaagcccaatttggggcttaaccttttttcgttagttcattattcaagaataatcatatcatccggtgcggcaaatggattttctttgttgatgtggtcaaagaaaagaataccgtttaaatgatcgatttcgtgttggcaaacaattgcgggatagtttttaagacgaatcttatgactaacaccttcaacgtcttgataacgtaatgtaattctgtcgtgccggggcacataaccggggacttcgcggtcgactgataggcaaccttcaccttcggctaaagcagcgtcttgaacagagtggctaataatcttaggattaataattacgtccttcaagattggggcttcgccttcagggcctgggactaaaacggctgacatttgttttgaaacatcgacttgtggagcggctaaaccaacaccggcgcgtaattgatatttcgcagcaatttctggatcttggctattttccaagaatgtcatcatgtcagcggcaagttgccgatcttcgtcagataatgggaatgaaacaggttgtgcaatttctctaagtgtaggattaccttcgcggataatatctttcattaatatcacagttaagacctccgattaattcatcataggttattctagcacagaattaaaaaaaacggaacaaatgggttgacccacctattgataaccagtagaatgggtatatagagatatcgcttttccgttaggtgaggctcctatatgaacatacgctgctactcagaaacatcgagagatgccaattgagtcaacaaaaactgccaatgaaggctttttctaacgtagctgaacatggtttctacgtcatatagtgctaaaactgaacgattgggaacgccatgatgttatggatgacgctcaattgttgtgcgtctttttttgtacaactaagtgcgatctctaaaattaattagaaagtctggtgagtaaaatgttgcaaacagctgaaggtccgttaagtagtagcgatagtgatcatccgaggtggtctgtctttttactgccagcattaggctagcagtgttacgacgacttcctcaaaagggaaggagtgtcgaacgcgatgcacaagaatttaaagcaagaaacaacattaaacgcaatcacaagcagcgggatgttaatgcgtttgttggcaactcgtccaagcgggttaacaacgattgaagctgcaaaacgcgcatcgttagttgccgattcaaatcagatggcaagtgttgtgcgtgatggttttctacgtgaaattggtgttgatcaaattgtagcaggtgacatcttagtattaaatgcgacagaaaaagcaccagttgccgtagcgacaattgataaagaaatggcggtcatcaaagctggtacagttgttaaaactggtaccagaggtgtcgtgttgaatgaaacactatcacctaaggatgatatcgctaaggttcgcctaggaaatgccttcttaatggcagtggcagcacttgtatcattctttgcggtccttgcagtcaacgaatttgcttttgttggtgtgacaattggcttagcaatttgtactgcagttatgatgatgcgtgttacaaaaacagggcaattcaaaaatttacttgtttttgtaagtatcggtcaattacggatgcgcctactagttaatcttcaccgtctaatgactcatttaagagttgaaccagtttgggcggatgttcaacgcttcctagtacatgctgggaacgctgaaattccccaaccggtcttggcgtgaagtaccccaacaaatataattaacaagcgtttagtacagacgatggtttgtactagcgctttttttgtgcattgatccggttgttattatataacagaatttaaatatattatataacagaggaagcttttagcggatgctaatcagttggtgactaaattcacatatacataaaacgataagcgcaaggtgtttgatgattagttatgtaaaacgcttgcatttagtgctgtaaaatgctaaattatatttgtgaagaagcttaattgatacagatataagcaaacattaaaacagtttagtgaagaggagaatgaatattatggccaataataaagctgcagttaattttgataaactactcggcgatgaaagccaagattttaaaacagttcagattctagatgaaactggccaagttgtaaatcctgatatcatgccagatctaagtgatgaacaacttgttgaattgatgaaacagatggtttggtcacgtgtgttagatcaacgtgcaactgccttaaatcgtcaaggccgtttaggtttttacgcaccaactgccggacaagaagcgagtcaattagcaagcaattttgcgatgaacaaggatgatttcttattccctggttatcgtgatgtaccacaattggtgcaacatggcttacctctatcacaagctttcttatggtcacgtggtcatattgaaggtaacaagtatccagaatcactcaaagcaatgccaccacaaattattatcggggcacaatacattcaagcaatgggtgttgctgtcgggatgaagaaacgtcagtccaagaatgccgtttatgtttatacgggtgatggcggtacttcacagggtgatttctatgaaggcattaactttgctggtgcttttaaagcccctgcaatcttcgttgttcaaaataacggttttgccatttcagttcctcgtgaaaaacaaacagccgcagtaacgttagcccaaaagggtgttgctgctgggattcctgccatccaagttgatgggatggatccactagctgtttatgaagtaatgaaagaagctagagatttcacaaccgctggtaatgggcctgttttaattgaaaccttaacttaccgttatgggccacatacgctttctggggatgatcctacacgttaccggacaaaagaaacagatgatatttggttaaaacgtgatccattagttagaatgcgtcgtttcttaacggataagggtctctggtcagaagaacaagaaaatgaattgattgatcaagttaaagcatctattaaagaagcaatcaacgaagcagatgccattcctaaacaaaaggtaactgacttcttaaaagtaacgtttgaagaacaaccacaaaatattcaagaacaaatcgcagaatacagtgcaaaggagtcgaattaagatggcacaaaaaacaatgattcaagcaattacaaatgcgctggatttagaattagcaagtgatgaaaatgtcttaattttcggggaagatgtcggtaaaaacggtggtgttttccgtgcgactgaaggcttacaagttaaacatggtgaagaccgcgttttcgatacacctttagctgaatctgggattggtggtttatcaatcgggttagcgctagaaggatttagacctgttcctgaaattcaattcttcggttttatttttgaaacactagattcaatcgccggtcaaatgtcacggacacgttaccggatgggtggcacacgcaatatgccgattacaattcgggcaccatttggtggtggtgtgcatacccctgaaatgcattcagataactttgaaggtatgattacccaaattcctgggattcgagtagttgtcccaagtaatccatacgatgccaaaggtttattgatttctgcgattcgttcaaatgaccctgttttatatttggaacatatgaaactttatcgctcattccgtgaggaagtgccagacgaatcatacacagtgccgcttgataaagccgcagtaacattggaaggttcggacgtttcaatcatcacttatggcgcaatggttcgcgaagctaagaaagctgctgaaaacttggctaaagataatatttcagtagaaatcatcgatttgcggaccatcgccccattagatattaaaaccattattgcatcagttgaaaaaaccggtcgcgttgtcattgtgcaagaagcacaaaaacaagcgggtgttggggcacaagtggcttctgaaatttcagaacgcgctgtcctttcattagaagcaccaattgggcgcgtttcagcaccagatacaccattcccatttggccaagccgaatcaacatggttaccaaacgcaactgatattgaaaataaagttaaggaagttattaacttttagtcgataacgaaggaagggacgacataagcatggcatatcaatttaaattaccagatatcggcgaaggtatcgcagaaggcgaaatccaaaaatgggcagtcgcagaaggcgatacaattgctgaagatgatacattactagaagtccaaaatgataaatcagttgaagaaatcccatcacctgttagtggtaagattgttaaaatcttagtgggtgaaggcgaagttgcaacagtgggtcaagtcctcgttgaaatcgatgcaccaggagttgaaggtaacgatgcaccaacagcagaaacaactacgccagcagcagaacaacctgcagcgccagcagccagtgaaggtgtttatcaatttaagttaccagatattggtgaagggattgcagaaggcgaaatccaaaaatgggcagtcgcagaaggcgatacaattgcagaagacgataccttattagaagtccaaaacgataaatcagttgaagaaatcccatcacctgttagcggtaagattgttaaaatcttagtcggtgaaggcgaagttgcaacagtcgggcaagtgcttgttgagattgatgcaccaggccacaatactgcaacagcttcagcgcccgtagcaacaacgccagcacctcaggcggcagaaacaccagtagcaactaataatagtagtgacacaagcgtggttgccattagtgatccaaatcggaaagtattggcaatgccatctgtccgtcagtttgcgcgtgagaataacgtggatattagccaagtgccagcgactggtaaacacggtcgtacgacgaaagaagatattcaaaacttcatgcaaaatggtactgcactagttgcttcaacgacaaccactgacactaagagtgcccctgtaaccacagcgacacctgaaccagcagtagccgttaaaccttatgaatcagcaacaccagaacttgaaacacgtgaaaagatgtcaccaacacgaaaagcaattgctaaagcaatggtgacaagcaagcatattgcaccgcacgtgacattatttgatgaagttgaagtttctaaattaatgacccatcgtaagaaatttaaggatgttgctgctaagaaagatattaagttaaccttcttaccatacattgttaaggctttagtaactgttttacgtgatttcccaacgttgaacgcctcaattgacgacacaacaagcgaaattgtttataaacactacattaatgtcggcatcgcaaccgatactgatcacggcctttatgtaccaaacattaaagatgccgacagcaagagtatctttgccatcgctaaggaaattggcgaaaacacgcaaaaagctttggataataagttaaaacctgctgaaatgagtggcggttcaatgacgattagtaacatcgggtcaatcggtggtggttggtttacaccagttgttaactaccctgaagtggctatcctaggggttggccgtatcggcacagaaccaattgttaacgaagatggcgaacttgcagttggtaaagtcttaaaattatcattatcatttgatcaccgtttaattgatggtgggactgcgcaacgtgcgatgaacgaattaaaagaattattagctgatccagagctactattgatggaaggatgatttaaaaatggttgtaggtgattttgcaattgaattagaaactgtcgttattggttctggacctgggggctacgttgctgccattcgagcagctgaaatgggtcaaaaagtaacggttattgaacgtgaaaatatcggtgggatttgtttgaacgtcggctgtatcccttctaaagcgttaatctctgcaggtcatcgtttgcaagaagctaagaattccgaagttttcggtgtttcaacaacgggtgcaacgcttgattttgcaaagacgcaagactggaaacaacaccaagttgtcgaaaaattaacgggcggcatttcaatgttgtttaaaaaacacaaaattgatgtcttagacggttctgcctttttagttgatgaacatagcttacgggtcattaaagaagaaagtgcacaaacttatagtttcaagaacttaatcatcgcaactggtagtcgcccaattgaaattaagggcttcaagttcaacaaacgcgtgattgattcaactggtggtttaaacttaacggaagtgcctaaggaattagttgtgattggcgggggttacatcggttctgaattagcaggtgcttacgctaacttgggtgcccacgtcaccattcttgaaggaacggattcaattttgccaaacttcgaaaaagacatggtgcaacttgtaacgaagaacttcaagactaagggtgtcgatgtgattaccggtgctatggctaaagaatcaatcgaaacagatcaaaacgtgactgttaaatacgaagttggcggcaaggaagaacaattggttgccgattatgtcatggtaactgttggtcgtcgtcctaatactgatgatatgggcttggaacaagctggtatcaagatggctgatcgtggtttaatcgaagttgatcaacaaggtcaaactaatatcaaaggcatctatgctattggtgatattgtttccggtgctgcgttggctcataaggccagttatgaagctaaaattgctgccgaagcaatcgctggtaaaaaagtgattgtggactacaaagcgatgccagcggtttgttatactgatccagaattggcaaccactggtttaacggttgctgaagcaaaagaaaaaggctataacgccaaaggttttaaattcccatttgctgctaacggtcgtgcgttgtcgttggctgaaactgacggttttgtacgcttagtaacgaatactgacgataatacgttgcttggtgcacaagtagcaggcgttggtgctagcgacttgatctcagaattaaccttagcaattgaatcagggatgaatgcggaagatttagccttaacaattcacccacatccaacattgagtgaagcaattatggatgatgctgaattagcattaggcctaccaattcacatctaacactgaagggttcgtcatgaattgtgacggccctttttgtatacacttgctaaaacgattcgacagttcctaaaaaaatgcgctataatgattgatattaaaaacgtcaattttgcttaaattgacttaaatttaggagtacttatgcaaactaactatagctatcctttagaatcagattggacaccagaagaagtggttcaagtcatgcatttatataatcttgttgaacaagcttatgaatttggcgctaaagttgaagatttaaacgcagcctaccgtgattttaaacaagtggttcgaagcaagatgattgaaaaacaacttgataaagcttttacggaagcttctggttattcaatctaccgttgtatgcaaactgctcaaaagagtggccgggcacaaattaagatgacgactaataattgaaagtagatgaaaaaagatggaacaagaggcgctatatcaattaagtcgttcattacaaaagtgggtacttgaagcagccgctgaaacacgcaaaaagatgacacaacctttagaaattatgactaaatcaagtcgtaatgatttagtgaccaacgtcgactgcgcgaaccaagcctttttcgcagaacaaatcaaagcggaatatccaatggcgcaattagtcggagaagaaggggccaatgtcggtgctggcgattggcataacggtctaacttttttcgttgatccaattgatggcacaatgaattttgttaagcaacaggaaaattttgcgattatgattggggtctacgaagatggacaagccttattcgggattatttacgatgtgatggctgatcaacttttctggggtggtccgcaattaggaattttccgcaatgaacaagccttagaacaggcagcggatcaaccgctatcagaaggcttaatctgcgttaatacacgcatgttggtgacgaatgaacgacaattacaacaggtcttcgttcaaagttcaggtgtgcgtatttatggcagtgccggcattacctttgcgcaattgttaagagggaatgcgcaagcttatatttcaaagttagcaccatgggatattgctgcgggacgcgttttagccgagacacttggttttcagattttaaatttcgatggtcaaccaatttcaatggttgccaaagaagggatgattattgcaccaaagcaagcgatgcaagaaattatcgccattatggcccattcaaaaacgaccgaataattagattttcatgaaaaagtcttgcgtattttcaaaaaatcgctaatataagaagcatagccctgtttattatggtaaaataatagcttgtatacatgagacaaacaacactagttaagtcactagcgagaggaagctgaaacacttgaaaaaaagagaagacattcgcaatatcgcaattatcgcccacgttgatcatggtaaaacaaccttagttaacgaaatgttaaaacaatcagatacattggatggccatgcagaaatttctgaccgtgcaatggatacaaatgatatcgaaaaagaacgtgggatcacaattctttcaaagaatactgctgttaaatataacggcaaacaaatcaacatcttggatacaccaggacatgccgatttcggtggtgaagttgaacgtatcatgaagatggttgacggtgtattattagtcgttgatgcttttgaaggtacaatgccacaaacacgttttgttttgaaaaaagctttagaccaacatttaacaccaatcgttgttatcaacaaaattgaccgcccaggctcacgtcctgaagaagtggttgatgaagtgcttgaattattcatcgaacttggtgctgacgaagatcaacttgaattcccagttgtgtacgcaagtgctatcaacgggacatcaagtcttgaatcagacttagacacacaagctcacacaatggttcctatctttgacacaatcttagatacaatcccagcaccagttgataatagtgacgaaccacttcaattccaagtggctatgttagattataacgactatgttggtcgtatcggtattggccgcgtttctcgtgggacaatcaaaatcggtgatcaagtttctgttcttaaacttgacggttctgctaagaacttccgggttacgaagatttttggtttcatcggtttagaccgtgttgaaatccaagaagctaaagctggcgatttaatcgctgtttcaggtatggaagatatctacgttggtgaaactgtcacaccagttgaccatcaagaagcattaccaattttacggattgacgaaccaactttacaaatgacatttgctgctaatgattcaccatttgttggtcgtgaaggtgatttcattactggtcgtaagattgaagaacgtttacgtcatcaattacacactgacgtttcacttcgtgttgaagatacagataaagccggtgcttggattgtttcaggtcgtggtgaattgcatctttcaatcttggttgaagaaatgcgtcgtgaaggcttcgaattacaattatcacgtccagaagttatctatcgtgatattgacggcgttacttgcgaaccttttgaaatggttcaaatcgatacacctgaccaatatacaggctcagtaatcgattcaatggcccaacgtaagggtgaaatgcaaaacatggaaagtgatgctaataaccaaacacggatgactttcttagcaccttcacgtggtttaatcggttattcaacagaattcttaacaatgactggtggatacgggattatgaaccacaccttcgaaaaatacatgccagtgattaaaaactgggaaccaggccgtcgtaacggtgcattagtttcaatcaatgctggttcatcaacaacttatagtttacaatcagttgaagatcgtggccaattattcatcggcgctggcgttgatgtttatgaagggatgatcgttggtcaaaacagccgtgatacagatatcgccgtaaacgttactaagggtaaaaacttaacgaatactcgtgcttctggtaaagatcactcagctgctatcaagacacctaaagaaatgtcacttgaagaatcaattgaattcttaaacgatgacgaatactgtgaagtaacaccaacttctgttcgtttacgtaagaagattcttgacacaggtatgcgtactaaagctgacaagaagcgtaaacgcggataataagcttaaaactatattaaaaggtagcctaagacactttaggctacctttttttagtgtcagatatggtataataacctgcagagtgtgcattactataacagtttaagtgggcgttaaatgatgattaaacaagaaacaatcgggtatatgactttaaaatcagacgcagctaaaattgaagcgttattgacgaagcaattcgacgcgctttgtttaagtcaatgtcccatcattgaagaaattattgatacacaactgtttggttttacaaaagaagttgattttgccaaaagagttcggttaattagtgaccaagaaggatcgcaattagtaaatgaacttgaaacgcgtattaatcaactttatttagagatttatcaaacgcaagctcagaatgaagttcatagaaattaggtgtaagtgtgtggcataagcttcgagataaagcgcagtatttagattattggttattaattccgtacgttattttatgtgcgattggggccttgatggtctattcagcgagttcggatttaatgtcgattcatggtgctaagccggatgcttattttactaagcaattaatttatatcggccttggctttggattattactattttccttctttttaaagttaaatctattaaggaaacctaagtttttaattggtgtgacagtcgtcattttattggcgctcttttacctattggtgttaagtcggattagaccggacgctgcgattaatggggcaactgcttggattaatctaggaccctttagcattcaaccagcagaatttgctaagttattaattgttttatacttggctaacatgttatccaaacgtgaaaagaatctgtcggagcattggcgtgacaatgttaagttgttttccgcacccgtgattttggtggccgtcattatcgcctttgtattggtacaacctgatactggtggtgcggcaattctagggattattttattggtattactatttgccagtggcatctctttttggtgggggatttcaatcatcagtgcaaccttagctgttattactgcggcgattgccggattgagtcgcttgaatttaacgaccggggtcaattatcggttcaaccgaattctagcctttttagaaccattcaaactcgaaaatatgggtgggagtcaactcgttaattcctattatgcgattaataacggtggttggtttggtatggggcttggtaatagtattcaaaaacgaggctatttgcctgaaccttataccgattttattttatcgattacaactgaagaactcggcgttataggggccctttttattttagggctactctttttactgatttttagaatttttaccatcggaattagagcgcgtcaaacctataatgccttaatttgttatgggataggcacgattattttcgtccaaagtttgtttaatattggtggtctgttaggcctgctaccaattaccggggtgaccttacccttcattagttatggggggtcaagcatgctagtgttagcgacaggcctgggcttagtcttgaacgtcagtgctcaggaaaaaaaggcgcttaaaatgaaacaatcgtgaggactcacaaatgaaaaatttggggcgttttttaatcgcattgggggcatggttagtcttattatatgcatggcccgttatgcatcatgctcagccaacagctgattcaacgcagagccgggttaaacggcatacaaaattgacgcatccgcaaaacccgttattaaagacgcagggtccggcgaagtttattaatcaacctgcgacgaaattggtagcgcaatatgggcaacctgttaaacagtcggtagaagatggcctgcagagccgatggttatttcaattaaatagccggcattatgttgaagcaacgattgacgatcaaacagggacaacgcaacaattagtggtaattggtcaagataacgcgattaagccgtttgaatttgggcagtcgttaaaggcaattactcagattacgacgattccagccaattatgagcttaatttacatgaacaaaaatttcaaattgagttgaacgaaacgcaacaacggcagcgaccactgattgcatttaagaataaaacctatgcgattttggtaatgcaaaaaggtggcgtggcgacggtggtttatttaaatgccaattgcttgttgcaatcgaacttatatccagtaacctcaatgacgccagtaccggtgccagaagtcgcaacaggtcaatcacaacaagttgatgatgagcggcaattggcattattacagtattgtcagacgatacggctcaacgccaagctacctgagttacggagcgacgtattactggaagctgatcaactatttctaaagacgctggaagaggcacctaagacgttgttaactgattctggaaaacgacgattgaagcgtgctaaacaacaacgacaaacggccttaccacaaaaattaactgaagcagattttaccgcgaaggctttagcagattatcaactaactaaacaacagctcttttattttgatcagccagtcagtgtgcaacagctcatttttgaacggcagaccaatccagcattttaccgagcaattcacgaccaagcctaccagcggattcaaattatctgtacagagggtcataccttggttgtgattggtgaataaattacaagataaggactgataaaatggcattagaaatgacgcaacgacaaggcattgttgtttggctgtattcattacggcaagtcaaacaattgcgacgttacggacttgtgtattatacgtctaaacgaatgaaatacgtttatttatacgttgatgcggaccaagcaccggcggttatcgaacgattaaagaaactacactatgttaaacgagtaacgcgttcgcaacgccccatgctcgatatggaatttggcgcattagccgaattagcgaatcaagagaccgctactaaagcggcattaaaggagtaaagagatgcggattattgcaggagaatttggtggccgtcgcttaaaggcggtccccggaatgaagaccagacccacaacggataaagtgaaagaagccatgttcagtatgctggggcaattttttgatggtggtcaagcgcttgatttatacgctggtagcggtggcctcgcgattgaggctgtttcgcgtggtatggaccatgcttatttaattgatcgccaatacgcggcaattcaaacgattcaagataacgtagcagtgacaaagatgcctgaatgtttcacaatctggaagatgccagctgaaaaagcactgttaaaactagcagatgcaaaagaacagtttgacttaattttgttagacccaccctataaacaacaacaaatgttagtcgaattacaacaatttgtgaagatggatctcttaaaaccaggggcgattattctttgtgaaacagacacgagtttaacgtaccctgaagaaatcccacattatacattgaaacgccaacaaaactatgggattactgaagtggcaattttcgaatttatcggttaaggaagtggtcggatgactgaaagaatcgcattatttccaggcagttttgatccttttaccaaaggacatctagatacagttgaacgggcaagtcggttatttgaccgcgtgattattgcagtcatgactaacgcagcgaagaagccattatttgatggtcccactaaagtcgcattgattgaaaccgtcattgccgatttggacaatgtgagtgtggtagcgcaacctaaaacgttgaccgctaattttgcgcaagcagttggggcccgctatctgattcggggcattcggaatgctaatgatttcgaatacgaacgggatattgcagcgctcaatcaaacgcaagatgcacaattagaaaccgtgttgttattagcaaaacaagaattttcgtttatttcatctagtatggttaaggaaatcgctgcttttggtggtcaagttgatcaattagtgccaccagcagtcgcagttgcacttcaagaaaaattaaaacacggaagagattagcatgccaaaaaataagaaactgacaaaacgattaattgtaattgtggttttaatcattgttgcagttgtttgtttaatgcccactggctattatattgaaggtgccgggaccgcagaaaataccagccaatatgttaaggtcgacggtaaacatgatcatcaaaaaggccattttatgctgacaactgttggtgtcagaggtccagtaacaccgttgcaattattattgtccaagacgcaaccttttacggaaattgaaagtcgtgacgaattgatgggcaatgaagataccgaagcttacgaacagattcaaaagtactatatggatagttcaattaacgctgccgttgaagccgcctataaaaaagctgataaggcctaccatacgaagtatctgggcgtttatgtgatgtcgatgttaggcaactccacttttaaagatgatttagcagtcggtgatacgattaccgcgattgatcatcatcaatttaaaaatgccaatgcttttgtaaagtatgtccaaggtttgaaagttggtcaaaaggtcacggttagttacgatcatggtcaaaaacatcaaacggcaacgcatcgtttgattaaattaccaaggacgcatcatccgggcctcgggattacgttaacagatcattctaaaatcgaaaccgatatcccggttaaaattgatgccggtgatattgggggcccatctgcaggcttgatgtttacgttgcaagtttataatcaattaacgaagcaaaatctccaaaagggtcgtacaattgcggggaccggcacaatggctgctgatggtactgtaggtgctattggtgggattgataaaaaggtactggtcgctagtcaagaaggcgcaacggtcttttttgcaccgaatgatcctgtaacaaaggcaattttaaaggttgatcctgattatcaaaataattatgcaatcgctaaaaataccgctaaaaaaattcatactaagatgaagatcgtaccggtcaaaaccttagatgatgcgttaacttatttgaaaaaccattaaaaaagtttgccgaagataaaatcggcaaacttttttgtgctttaagggtatataagagtaaggaggtgacgatgatgtggcaagattattggcagcgatatcggcgtttttggtgggtgccttgcttagtgctattggggatcatcgcgggtggcttttattggcatcaatcgcaacaaaaacaaaaagtaacgcaaaatgagcaactgctagcaaccagtgcgtctaaaacaaaacccgctactaagaagacacaccaagcggcaaccaagaaaaaaggcggttttgtcgatataaaaggcgcggtggtctacccgggaatttatccgatcacagtctctgaaacgcgcttatttgaggtgctcaaaaatgcaggtggtccgactgatgcggctgataccaagcggcttaatttagctcaaaagttaaccgatcaactgattatttatattccgaaaaaaggagaggtggttactgatcaagaactcattcaagcgccacaacaaatcgcaacgaccagtgagcgtacgcaagaacaggcatcaactgggacaagtgcgaatgcatcgagcacgagtgacactgctaaaatcgatttgaatcaggctgatagtacgcagcttcagaccctcaatggcattggccccaagaaagctgaacaaataattgcttatcgtgatgaacaaggaaaatttaaacagattgaagatctacaaaaagtcggcgggattggtccgaagacgtttgaacaattgcaatcacaaatttgtgtgaattagttttatcaagtggtatttttgctatactagaaagaaacaattaaagggagcatgatgatggccaataagagaatgccttggaatcagtattttatgttacagtcggttttattatcgatgcgcagtacctgtccacgtctatttgtgggggcgctcgtcattcgtaatcggcggattattgccgggggttataacggctcggtggctcacgaagatcattgtattgacgttggctgtttaatgcgggatggtcattgtctcagaaccattcacggtgagatgaatgctttaacgcaatgtgccaaatttggcgttcaaaccgaaggcgctgaaatttatgtaacgcattttccttgtttacaatgtacaaaactaattattcaagcgggtatcagtaagattcattaccaaaaagattatcataatgatccttacgcgctaaaattaattgaaaaatcagggattgaacttgatcaagttaatttatcagttgatgatgcgcacacactcgttaatttcttggagaacgaacaagcgactgaatgaaaaacaactggatttatccagttatttgtttaatcagtttaaatagcttaatgcttggggggcaatcttggttaacctggagcttattattattggcttttgtcaaattaataagtctcagacaaactcagataacgattatgacgatcggcttatgccttgtttacgggggccgcttttggataagctatcatagtgtgacgcaaccgcaacaaccggtagcacagtactttaaagtgcaacccgatgcgattcaagtagcgggcgatagtgtccaattaacggcaatcggccaacaagatggtcagactattaaggcttattatcgctgccaaacgttcgccgagaagcggcgatggcagcaagtacgacaccccgttttgttctatggggaaaaagattttaaacgtatacagggtgctaccaatcaaaatgagtttgattatgcccgttttttagcgcaacagaagcgctgcttttaccaactgacgttagccaaaaaaacaacttttgcgctgagacgccctagtagcggtttggattggctacattattggcgccaaacgtgtgcactgtatttacgtaagttaccaacagcactacggtttcatgcgcagacgttactattaggtttgcgggaagcgcaagttgaccattaccaggttgttttgggccacttagggattattcatctcttaagtctatcagggttgcacgtgttttatttagtgcaagtcattcggtggtgtgcgacttattgccgcataccgcgtgagtggttaaactgtatgttatttgggctattgccggtatatgccttactggttggtggtacgacaagcattagtcgcgcgattgcgcttattttatcccggttactttgcaaacagttgggcattcggcgatcaaggttagatagttggagtttagtattactggtcaatttattctggcagccttatttgctacatagtatgggcgggattttaagttatttgatggcctttgcgctcatttatattggtgagggtagcacttttaaagttgcttactggctaagtttattgagtttgccggtttgcttacgctttaattatcgctggcatgtgctgacgataatgatgaatgccttggtaacgcctatctatctgccaattgtgctaggtttggtgattgtagcgagtgtgatgttacctgttagcaatctagtggttaacggatgtgagtggctgttacagttgatttacaaaggcttaggactagttgttcaaattccccatgcgatgattacgtttggtaaaataccattattaccgttactattgattgtgacggtcagtctcttgttaatcgatggccaggcaattagtaatcaatggcgtaaacggctgaaacgcacattggtaagtttgtatctggctagttttttggcgattcattttaatccgactggtcgggtggtcatgtttgatattggtcaaggtgatagtctgttgattcagacgccgtttaaccggcatcagcttttaatcgatactggtggtcgcctagcgctaccgcaagcagcttggcaacggcgggcgcaggtttcacgagcggaaaaagtaacggttaattatctctatagccaaggagtagatcacattgatgcggtggcactttctcatcaggatgccgatcatattggtgatttgaaccagattttaaaacaaattcgtgttgatcgaatcatttgtgctgccggattaccgcaaaatcggcaatttcaaagacaaattcgaccatttttagcaacggttcagatagaaccctatttagccggggccgcttttaaagtgggatcgcaaaaatttaacgtcttagcaccgactaagccgggaaaaggcgaaaatagtgattcgttagtcttacaggcacaaattggtggggctagctggctttttacaggagatctagaacaagaaggtgaacgggcaattatcgagcggtatccacaattaaccgtcgattatttaaaagttggccatcatggtagtaaaacggctagtgaccccaccgtgattaaaaaattgcacttaaaaggcgcattaatctcaaccggcagagagaatcgttatggtcatccgcaccaggaaactttgacgactttgcaagcggccaaagtgccttattggctaacggcgcagcaggggatgttgacctgggcgtacggtcccggtcaaagcgaaaaactgcaaacaacaataaaggatagtgaaaaatgacaattgaacaattacaaaaagagcttcaacaaaatcaattagcaccgatttacctggttttagggcaagagtcagcgttgattgaaaaagcgcgtcaactctttaaacactatctaccagaagaagaacaaacaatgaattttgccagctatgatttagcaacgaccgatgtggcgaatgctttggatgatgccgaatcggcccctttttttggtgagcggcgaattgtctttatgcaaaatccctattttttaacgggtgaaaaggttaaaaacaagctcgatcaggatttagttcgtttccaagcctatcttgaaaagccacaaccaacaacaagtgtggtactatttgcgccgtaccctaagttagatgaacgtaaaaaaatcgtgaagcaattaaaaaaggttgcttcattagtttctgttgaaaaagtgaatgagcgccaagttcaacagttggtaaccgctgagttgaagcaacaggggatgcagattgaaagtgaagcgttagccttattgattagtaaaaccaatagtgactatagccaaatcatggcagaattaccgaaattaatgctgtacgcacaacaaactaaacaaattacgacagcagcggtcgctgaattagtcagcagcagtattgaagataacgtcttttcattagtcccgcttgttttgcagaaaaaagtgggccccgttttgacgatgtatcatgaattactactccaaaaagaagaaccactcaagattaacgcgattctgatcggtcaatttcgcttactattgcaagttaaaattttatttgaaaaagggtatagtcagggcaatctagccagtgttttaaaaattcatccgtaccgaattaaattggcgatgcaacagattaaacatttttcaaagcaaactttagcgcaagcttatttaggattagaggaaatcgaagttaaaattaaaaccggacagggacaacctgaattgttatttgaattgttcatgctccaatttgccgctaaaaaagtggcataaaacacaaaaaaataggcccggctaaaacgaaaacgtcttagtcgggcctattaaaatattggttagaattacttagccatcattttgtttaaacgtgacttgtcacggccagctttgttagcatggattaagccttttgttgaggccatatcaatagcgcgtgtagcagcttttaataggtctgcagcttcttcgttaccagcagcttgagcagctttgaactttttgattgctgaacgcattgtgcttaattgagaagcgtttctgttgtttgctttttcaattgttttcacacgtttcatagcagatttaatttgtggcatggttgttcacctccgatgggtttcactatctttataaaaaagatttttaatttcaacagacgttattataccaaaatagtgtgggggattgcaataaaaacttgtaaagtatttaaacttgactgcttaatgaatttgaacttagccttgctttcagcataattttttagtaaactaagacagtgctttaaaagcacaaacccgttactctgtttagcgacgttcacccgacgctattcgttgtttcgggtaatataactgaagggtggaaattagcaatggctatttcacaagcaagaaaaaacgaaatcatcaatgaatatgcacgtcacgaaggcgatacaggttcagcagaagtacaaatcgctgtcttaactgcagaaatcaactcattaaacgaacatttatctgttcataagaaagatcaccattcatatgttggtcaaatgaagaaaatcggtcaccgtcgtaaccttttacgttacttacgtgacaacgatatccaacgttaccgtgaattaatcaagagccttggcttacgtcgttaattcaacctttaaaagcaaacagtctttttggctgtttgctttttttgtgcgcttttttaatgtgaacattgaaaatgtaaggcctttagtaatcaaaagctgttagtttgtttaaattgtgataaaatatgtattagactttaaagcggatgagttttaaacgaaagtaacactcaaaaaaacaaataatagtttgaaagtaaccctttcaattttagaggtgaaagaatgagtaatattaagattatgccacttggtggtgtacgcgagaacggtaagaatttaaacgttgtggaagttaacgacgaaatttatatcttagattgtgggttaaaatacccagaaactgaattattagggattgatattgtaatcccagatatgacttatttggaagaaaatgcagaacgtgtcgctgggattttcctaacgcatggtcacgctgatgcaattggcgccttgccatacttcttgaaaggccatgatgtgcctgtctttggttctgaattaacaattgcgctcgctaagattacggtcagcagcgaacctaaattacggcatttcaataatttccacgtgattaatgccaatacagcaattgattttgaacaagcgacagtttcattcttcaaaacaacgcataccattccaggttcattagggattgttgtgaaaacagatgaaggccaaattgtttataccggggacttcaagtttgatcaatcagcattaccaatgtatcagacggattatgcccgtttaactgaaatcggtcaacaaggcgtcttagccctattgagtgactctgctaatgcggaatcaccttttgaaacggctaatgaacgcgatattgccgaatcaattttagaaacatttaaatatcaaaacggacggattatcgtggcttcagtggcttcaaatatcctccgtattcaacaagttatcgatgccgcttataaaacaaaccggaaggtcgttttaacaggccgtgatttggaaaaaattgtgcggacagcaatgcggttagaaatgttaaccttgccggatgaagatatcttagtacaacctaaagcgttaagtacattggcacctgaagaaacagtgatccttgaaacaggtcgcatgggtgaaccaatcaaagcgctccaaaagatggcaacaagccatcaccgcttaatccatattgaacaaggtgatcttgtttatttaacaacgtcaccttcacatgcaatggaaactattttagcgaaaactaaggatatgatttatcgcgcaggcggcgaagtcaaagcagtcggcgacgatctacacgcttcaggtcacgctaataaaaatgatttgcaattaatgttgaacttattacacccacaattcttaatgcccgttcaaggcgaatatcgtcagatggctgctcatgcggatattgcgcatgaaaccggaatggattataagaacatcttcatcgtgggtaagggtgatattgtcgcttacgacaacgataagatgcatgttggtggccaagttgatgcgactgatgtcatgattgatgggagtgggattggtgatatcggcaacatcgtcttgcgcgatcgtaaattattgtcagaagatggtatttttatcgcagtcgtgacaattgaccggaagaacaagaagattattgctgaaccgaaagtaacggcaagaggttttgtctacgttaaaacaagtaaggacctcatggcagaaagttcagaaatcatcaagcaagctgttcaaaataaccttgataataaggaatttgactggagtcacttgaagcaagacgttcgtgaaaacttaagtcattacttatacgaacaaacaaaacggcatccagttattttaccggtgattatggaaattaaccaaaatcaccgtcgtcaaaagaaagacaccaaaccagcagttgagaaaaaacaagattaattaagtgataacacttaaaaaagggccggataaaggattatttatcggggcccttttaatttagtgtttttgaagaggagtgttagtgatgggagaattgacggccttgccgaatcaatttgaaaatttggtccgtctgggcaaagtagcgctcaaccagcgccaatggccagaagcaatagcccatttggaggctgcttatgacttgcaacaaacaacggcattaaaccttttattggtcagtgtattagtggctgctggtgacaatcagcgcgcgctgcaattagcctttgaaaaaaaggacttctataccaatgagaccgatttaaggttgctgtataatgggctactcattaaaaatcagcactttatcgcagccaatgagctgtggtctgctgtggaggcgactgacgcctttgaacagcgaactaagcaaaagggacaagcgctattaaaaacggctgaaaaagcctaccaagcgactgagcagcaggcaatcaagaaacgccaagaacaactctacaatattacaacgggtgattttcaagaccaacaacgccgactggatgcagcagaattattaccactagctgattatttacagggggtgtcaccaattttggtgaacccgtattgccatccatttgtgaaaacaacgattttagaaacgctcgttcgtttgcaatattcagaatcagtgacgattaattggttcgatcaggtccgacaagtgacaccttctgagttagaattgatgactaatcggcctgttttaaaattaattcaaaaaacaattcaaaatatcttgggacaacaagatccaattattttagaagcggccttagcagagtgtcaaatgacgtttgcctatctttatccatttgaggaaacggtgattgataatcctgaagaatggggccaggcgctgattcaacagttaggggtctttatttttgaaccaacagttccaatttcagaaaagacgattcaatggctaaaaaaattgcaagaattaacagaagaactagtcttttagggctagaaaacaatgattttatgctcaaaataatactttttttaaggtttaagtgtttacaaacgcgctcatagcagatataatcatttttgaattctttaagcgtaaaaaaacactttgattttaacgcttgaagtattataatattacgtaaaggattatcagtattagtgaaatgctatacgctgattttttcttgcgaaaatacaggaggttcgtttaatggcagaaaaagcacattacgaaagaacaaaaccccatgttaacatcggtactatcggacatgttgatcatggtaaaacaactttaacagcagcaatcacaaagatgttggcagacaaaggcttggctgaagctcaagactatgcaaacatcgatgctgctccagaagaaagagaacgtggtatcactatcaatacagcccacgttgaatacgaaacagaaaaccgtcattatgcacatattgacgccccaggacatgctgattacgttaaaaacatgatcactggtgctgctcaaatggacggtgccatcttagttgttgctgcaactgatggtcctatgccacaaactcgtgaacatatcttgcttgctcaccaagtcggtgttgattacatcatcgtcttcttgaacaaaacagatttagttgatgatgatgaattaacggacttggttgaaatggaagttcgtgaattattatcagaatacgatttccctggtgacgatattccagttatccgcggttcagcacttggtgcattgaacggcaaccctgacgacgttaaagctgttgaagaattaatggctactgttgacgaatatgttccaactccagaacgtgacacagacaaaccattcttgatgcctgttgaagacgtatttacgatcactggtcgtggtactgttgcttcaggtcgtatcgatcgtggccaagttactgtcggtgacgaagttgaaatcattggtcttaaggaagaaattgctaagacaactgttactggtttggaaatgttccgtaagacattggatcaaggtcaagctggcgataacattggtgctttattacgtggtatcgatcgcgaaagcatcgaacgtggccaagttttagctaaacctggttcaatccaaactcacaaaaacttcaagggtgaagtttatatcttgagcaaggatgaaggtggtcgtcatacaccattcttctcaaactatcgtccacaattcttcttccatacaactgatgttacaggtgttatcgaattaccagaaggtgtagaaatggttatgcctggtgataacgtaacatttactgttgaattaatctcaccagttgctattgaaaagggtcttaaatttactgttcgtgaaggtggccgtactgttggtgccggtgtcgtaagtgaaattattgactaatattcaacttagttgaattggaaaaactcgtagtgtaaaagctgcgagttttttatacataagattcaatcaataatgcgctttaatcgctaaaaaaacggattttatcggttttttaggccaataaatatttacaatttaggtcaaatagtttatgctgattaagtatgcaattgatagattgtgaatataactgtcggagggaaattatgtcagcaaaatgggaaaaaaagggcgccaatgatggtgaacttacctttgaaattgatttagataaaattagtgaaggtttagacgtagcgttcaaacgtgtacgtaaaaacatcaacacacctggtttccgtaaaggaaagatgcctcgccaaatctttaacaagatgtacggtgaagaagcactttacgaagatgccttaaatgctgtattaccagaagcatatgaagcagctgttgcagaagcagggattgatccagttgatcaaccacaaattaatgttgaaaaaatggaaaaaggtgaagcttgggtccttactgctcaagtcactgttaaaccagaagttaaattaggcgattacaaaggcttagaagtaccaaaacaaagccgtcgtattacaattaaagacgtagaacaagaacttgaaacacgtcgcgaacgtcaagctgaattagtacttaaagaagatgcagcagcagaaaatggcgacacagtcgttattgattatgctggttctgttgatggtgtaccttttgatggtggccaagcagataactactcattagaattaggttcaaactcattcattcctggttttgaagatcaattagttggtcacaaagctgaagaagatgttgacgttacagtaacattccctaaagattaccaagcagaagaattagctggtaaagaagcaatctttaaggttaagattcacgaagttaagggtaaggaattaccagaacttgatgacgaatttgctaaggatatcgacgaagacgttgattcattagacgaattaaaagaaaaaattcgtgaagaattaaaacaacaaaagaatgatgctgctgacgctgctatccaagatacagccgttgctaaagcaacagaaaatgcaacaattcctgaattacctcaagcaatgattgacgaagaaatcaacagtcaattacaacaatacttaggtaacatgcaacaacaaggtatcaacccagaaatgtactatcaaatcactggtacaacagaagatgatttgaagaaacaattcgccggtgatgctgacaaacgcgttaagacaagccttgtcttagaagctgttgttgaagctgaaaagatcgaagcaactgacgaagaagttgctgcagaacttaagagtttagcagaacaatacaacatggaagaatcagctgttcgcagcgtcttatcagatgacatgttaaaacatgatatcggtgttaagaaagctatcgaagtgattgctgattcagctgttgaagttaaagacgctaaataattagatagttagatgagctttaatcggttctaaaagcgggttcaaggtgactactttgaacccgcttttgcgttatatggcgttaaaaacggattactttcatctagcgcagtgatgtgatatagtcttaattacatttctaagcggtctgagatgactaatattagaaatctgctatgatagatgtataggaaggggagaatcccagtatgttagatgatacagaaacaacgaatggccctgttacttgttcgttttgtggtaaatcacaagatcaagtaaagaagattgtggccggccctggtgtttatatctgtaatgaatgtatcgatctctgtaaagaaattatcgatgaagaatttaaagatgaagctgttaatgacttattagaagtaccaaaaccacgcgaaattcttgcaattttaaatgattatgtcattggtcaaacagaagctaaaaaggcgctctcagttgccgtttataaccattacaaacgtgttaaccaaatgacggttgccgaaaaaggtgatactgaacttcaaaagagtaatatcgctttaatcgggcctactggctcaggtaagacattcttagcccaaaccttagcacggatcctcaacgttccatttgcgattgcagatgccacgacgttgacggaagctggttatgttggtgaagatgttgagaacattctcttgaagctcttgcaaaacgctgattttgatgttgatcgcgctgaacgtggcattatttatatcgatgaaattgataagattgccaagaagagcgaaaacgtctcaattacccgtgatgtttctggtgaaggggtgcaacaagcacttttgaagattcttgaagggacaattgctagcgtgccacctcagggcggacgtaagcacccacaacaagaattgattcaaatcgacacaaccaatattttattcattattggtggggcctttgatggcatcgaaacaatcgttaaaaaccgtttaggtgaaaagacgattggttttggtagcaaagctggccaagcggtcgatgaaaatcaaagcttgatgcaacaaatcgtgacggaagatttaatgcaatttgggattatccctgaattcattggtcggattccaatcacggctgcacttgaaaaattaactgaagacgacttagttcggatcttaacggaacctaagaacgccttagttaaacaatatagcaaattgatggctttagacgatgttgaactagaattcacgccagaggcattacatgcgattgctcaccttgcaattgaacgtaataccggtgcgcgtggcctccgttcaatcatcgaagaagtcatgatggatatgatgtttgatgtaccaagtcgcgaagacgttgtcaaagtcttagtgacaaaagaagccgttgatggcactgctaaaccacaacttttcttagctgatggtcaagaagcgtcataatgactatgaagttgtcggggcgtaatcgacccggcaactttttttacataagggtgccgctaaacatggatttgaaaataagtcaacggcgcaataattatttatttatgctaaactagcattcgaaggaaataatcggaggttattatggaagtacatgaagttgaaatggtgatgagtgcggtagctgcttcgcagtaccccactgaccaattacctgaaatcgcgttatctggccgttcaaatgtcggtaaatcttctttaattaataagttaattaatcgtaagagttacgcacggacatcaagtaagccagggaagacgcaaaccctaaatttctaccgtgttgaaaatgaactttatttcgtcgatgtgcctggttatggctatgcgaaagtttctaagaaacaacgggaaaaattcggtcaaattatcgaggcctacctcactaatcgggataatttacgcggcttaatttcattgatcgatggtcgtcatgaaccaactgatgacgatattgcaatgtatgtcttcgctaagtattacgatattccagttttagtcgttgctactaagatggataaaatctcaactgggaaatggaatcgccaagaaaagatcattaaagaggcgcttgattttaacccagttgataagtttgtctgtttcagtgcgttgactggcgctggtaaggataccgtctgggaatggatcgaacaacaatgtgatattggaggtcgtcgttaatggaatttaatgaataccaaaaattagcgaacagaacgctatatggtaatgaacaagttttaacgaacttggcattaggtttagctagcgaaagtggcgaagtcgtggatattgtcaaaaaatatacattccaaggccaccaactagatgaacaagtacttaccaagaagattggtgatgtactctggtatctatcacagattgctgaatggaataacgtcgactttgaaaaagtagcacaggaaaatattgaaaagcttaaagaacgttatccagaacgacacgcagaataattaaagcgtgggctataagtcaggtattaaaaaagaggtgcggacaaagtaattttgtccgcacctctttttgattattcttttttagttgtctttgattccgtttcttttaatttttcagccgtttcttcaacttcagctgccattttttcccgatcgccgggaattgatgcaaatttgtcgaataaactagttaaatctgtttgacgtgttacttttaagcccataatatccctcttttctgatgtgagtctatcataccagataaaaatcagttcgccaattattcttaatttataaataaatattgcataaatatttatagtagtgtattatgaaaaacatcataggaggggatcaaatgactatcaaaaaaagtttagcattcattttactaccattagccttgctagtggcactattagtggggaataaccaagctgtatcagccgcggggcagacggttagtcgcgttcaagctaagaagacattagtgttggggacaagcccagattatgcaccgtatgaatttttagtgaataaaaacggcaaaaataaaaccgttgggatggatattgacgttgcacaaaaggttgctgacgatttacacattaagttagtgatcaagtcaatggattttgacgcgttgttagttggtctagaaactggcaaggtcgatatggtaatttcagcgatgtcaccaactgatgaacggactaagagtgtcgatttctcggatgtctattacttaggtggtcaatcgatcctcgtcaataaggccgacgccaagatttataaatcaaaaaatagttttatcggtaagaaggttggggtccaaacggggagtctccaacaaacattagctaaaaaacaaattaaaaatgcacagattacaggtttaacaaaagtacccgatttagtattagcacttaagagtcataaaattgacgggattgtggccgaagaaccagtggcaactgcttatgccagcaacgatcctgaattagttcaaatcgacggtaaatttaacttaggggcagacatgcaaggttcagcgattgcatttccaaagaactcaccaactttagttgctgctgcaaataagagtatcgctcaaattaagaaacaaaaattaattccgcaatatttaaagagtgcgggtagtttgatgaaaacgaacacgcacaatacaagtatgtggcactactggtcttatttcgctaaagggattggttataccttattcattacaattatttcaatcattatcgggatcttcattggggttgtactcgcctttgcaagactttctaagaataaactattccatagcctagcagtcatgtatattgaattcgtccggggcacaccattgatgattcaaatcatgtttgtctatttcgggattggcttgtgggtcaatattccagccttattcgctggtgtaattgccgtttcgcttaacagtgctgcgtacgtcgctgaaattattcgttcagggatcaacgcgattgacgctggtcaaacggaagcttcaagaagtttggggctctcacaacacgatacaatgcggtatatcatcttaccacaagcattgaagaacatctggccagccttaggcaacgaatttatctcattaatcaaggaaagttcaatcgtttcaattatcggtgtgacggatttgatttaccaattaaaagtggttcaatcagcaacctacaaaggggttgcaccaatctttgtcgcaatggtcatctactttatcttaacctttagtctttcgaaactactcaaccatattgaaaggaagatgcaacatgcttaaaattaatcaattagttaaaaaatatgacgataaccttgttttgaacggggttagtggtgatgttgaagctggtcaagtgatcgtggtcatcggaccttcaggtggtgggaagagtaccttattacggtgcttgaaccggttagaagaaccaacgagtggtcaaattctttttgaggggaccgacttgatgagtctctctgaaaagcaattggaccaaatgcggactaagatggggatggtttttcaaaacttcaatctattccataacttaacggttttagataacctaagactcgcaccacaaaaggtcaaacgtcaatcaaaagaagaagcaacaaaaaaagcacaacagttgttagaacgggttggattagccgataagtccgatgcttatagtgaccaactgtcaggtggtcaaaagcaacggattgctattgctagagcacttgcgatgtcaccagatgtcttattatttgatgaaccaacctcagcgctcgatccagaaatggtgggtgaagtgttgaaggtgatgcaagatttggcacaagaaggcatgacaatggtggttgttacgcatgaaatgggctttgcacgggaagtagctgatgaagtttggttcatggcagatagccaaatcgttgaaaaagggacaccaaggcaacttttcgaacatccgcaagaagaacggacccaacaattcctagacaaaattttagcgcaataattgtcgatagttgcattttagccaaaaacacgtaaaatataggaacgaacacttgttttgggttaaaggagtggtgtttttggcaagtgaacatatcgaacataaattagccttattaccagccttaccaggctgttatttgatgaaagatattaacgcacagattatctacgtggggaaggccaagaatcttaagaaccgggtccgctcgtattttaagagtagccacgaaggtaagacggccaaattggtctctgaaattgtcgattttgaaacaatcattacatcgacaaataaagaggcctttttgttggaaattacgttaatccaaaagcaccaaccctactttaatatcaagttaaaacgggggacgggctatccgtacatcaagatcaccaatgaacgtgatccgcgcttattgattactggcgatgtcaaaaaagatggtggctattattttggcccgtatccggacgtttatgcggctcaggagactttacgcttcttgcaacgtgtttaccccttgcggcgctgtcagggtcatcaaggacgtccttgtttgtactatcatatggggcagtgcttgggggcttgcttccaagaagtaccagaagcagcctataccgaacagattaagaaaattaaacgctttttaaatgggcaagtcgacaatgttaagaaggatttaacggagaaaatggcgacggctgcccaggagatgcaatttgagcgggccgctgagttgcgtgatcaattacgctatattgaagcaaccgttgaaaaacaaaagattatttctaacgatcatacaccgcgtgatttatttgccttttacatggataaaggctggttgtcgattcaaatcttctttattcgccaagcacgtttaattcggcgggaaaaacgtctcttcccatgtgtgaatacgccggaagaagaattggcgacctttattctccagtggtataaccgtaagaataatgtgttaccacgggaaattctcgtgccagatgggatcgaaaagcaagtcttatccgatattttgcaagtaccaattcgaacgccacaacggggagagaaaaaagccttgatggaaatggcgcaaaaaaatagccgtctggtattagaagaaaagttccgcttattggaactcgataatcgcaagacggttggtgcgcaagatgaaattatggatgcactcggcttaccccatggtcatgttatcgaagcattcgatcattcgcatattcaagggaccgatccggtgtcggcgatggtcacatttgttgatggccgcgctgagaagaagctttatcggaagtataaattaacccagacggcagagcgcgccggcgccaacgaagatgccaatacgcgcgaggtgatctatcgccgttattcacgcttgctaaaagagggcaaagcgctgcctgacttaattttaatggatggtggggtagttgaactcaatgccgccaaagacgtcttagaaaacgaactagggctcacaattccagttgcggggatggttaaggataatcaccataaaacagcttcgttattatttggtgaagccgatcaaacgattcagcttgatcctaagagtcagggcttttacttattgacgcgaattcaagatgaagtccatcgctttgcgattagttttcaccgccagttacgtggtaagaattcgttgagttctaagttagatgatatcaagggggttggtccgaaaacgcggacgaaactcttgaagaattttggctcgatgaagcatattaaagatgcgtctgttgaagaacttgaagcactcggaatatcgaagacagttgcgcaaaccattaaattatcactataaaaaaacgttaggtcagacaaattattgtctagcctaacgtttttttaatccgctaatgggttggctaacagccaggtccatatgatgttgtaaatttgctaatagttgatgaataaatgataaggattctttttgtccgcctagtaaccaatcacgccaaatttggtagacaccaaccgccatgaattgcacgtaatatttttgccgaatcgcatccagtgaccgccaggggtcaattgtttgataaaactgctgaatattgtccgtgaagacgtcgcggacgatcggttcgaaaccgcgtttgtccgccagtttcagagtcgcttctaattcgataaaaaatgtcgagagggccgctaacttaagttccgcggattgttgctgtaagacggccttgaagtgtgtttcgataattggtgtaaaataatcgattaagacctgttcgagcgaatcaaagttgcggtaaaaagccattcgactgacaccggcacgtttcacgacttgggtgaccgtaatatcttcaaattgatgggcctctaggagttgtaataatgcggtagtgaggtattcttgggaatcttgtttgattgcttgggcatggttagttgctgccataacaattttgcctttctgtcacagatgctgatgaatcgcttgtttgtgaacgtcttttattttaatataaagccatagatgttacaagtgtaacgaaagcgaggaattgaagatgaaagaattagtattagtaactggtggtagtggttttattgcatcacatattattttacaattattagaacagggctacgccgttcggacaacggtgcgttcaatggccaagagccaacggattgtcaccagcatgcaagcaaacgggattaccaatattgaagatttatcgatcgtaaaagccgacttgcaacatccagagcaatggccggctgcgatggttggggtcagttacgtcatgcatgtggcctcaccaacgcctaaattaaatttcaaggatgaatctgaaatgattaatccggcagtgaatggtgtcttaatggttttaaaagccgctcgcgatgcgaatgttaagcgcgtcgtgttaacctctgcatatggggcaatctgtgcggggcatcctaatcaacaaacgccttacactgaagccgactggtcagatttaagtgctaaaaatattcatccttatcaaaaatcaaaaacgttagctgaacaggcggcctggaacttcattaaaactgaagggcaaggcttatcactagcagctgtcaacccggttggtgttatgggccctgttttatcatccgtttattcgcattcaaacgtgcaagttgaacaactgttaaatggccaagttaaggctgtgccacaagtaaaatcaggatacgtcgatgtccgcgatgttgcgagcttacacctattagcgatgactgcgccacaagcagatggcgaacgcttcttagcaaccactggtgaaacattatctatgttagaagtggccgatgtcttacgtgatgctttcccacaatacgcaagtcggttaccgcaaaagacaattcccaatagtgttattaagctagcagcgacattcaaaccggatttacgaatgttagcgactttagtgggtaaatacgccgatacaagtaatgaaaaagctaaaaagcttttaggttggcaacaaagatcggcagcagattcgattattgcaaccggtcaatcgatgatcgatttaggtattattaaataaagattggtgaacgtcacagggcaatccttgtggcgttttttggcggtttcaagttgctctaaaatgactcttttatctagcccccaatgtatgatacgcttattctaatttggaacgggaagtgacacaaatgcagaaaaaagtaattttaaaaaacggactgggcattatcattggggcctttatttatgccatcgccattaacgattttttgattccccatcaaatcggtgagggtggtgtgaccggactcaccgcgattgggtattatgcacttgcgattccgccggcttttacgaatctagttctaaacggcctattagtggtaattggctttagataccttgagcgtcaaacgatttggtattcagtttgggcggtaatctggatttcactctttttgaagctaccgcattttatcggctaccatacgacacaaaccttaattccaacggtgattggtggcgtcttgatggggattgcaatggcaattattattcattgccaagggacaattgccggtagtacgattctggcgaagattgttaaccgctatttaggaatcccgaatgggtctgcgatgctctttttcgatttaattgtcgccattccgtcgggcttgatcattggttttcaaaatatgctcttaacgattattgaactctatttatcagcagttgttttgaataaactactggctaaatttggggctaaacgcgcggtaacgattatttcagatcaatacgaaacgattgctgaaacgttatcgacgcagtttcaacaagggattacaattattaaggcccaaggctattacagccaaaatgagcggccgatgttgtatgtcatttgtacggctaaacaactcgccactttggtaccggttgtctcacaaatcgatgttaaggcgttggttgttgtagaagaagtccgtagtgtgcaagcggaacaattaaaacagttactataaaaatgattggtcagacattgtggaccgtcaatctaaaaaagaagaaggttaatcatgacagttaaacaaccaacacagattgaagtgcggggcggtaacgtcaataacttaaaaaatattaatgtcgatattcctttgaaccaatttgtggcgatttcggggccctcaggatcgggtaaaagttcattggcgatgggcattttatacgcggagggctcgcgacgttatttagaggcactctcgacttacacacggcggcgtattacacagaataaacgctcgcaagtgcaagaagtccggcatattccatcggcaattgcattacgacaacgccccagtgttccttcagaacggtcgacagtggggtcgatgagtgaaatttttaatgttgtgcggttaattttttcacgtttaggcaccacgcgttgtccgaacgggcataagattcaacctagtttgcagattgcgcaagcgatggatttagctggcgataaaatgggcgttattacctgtccaacttgtcaggtagaatttatggctaaatcagctgaggactttgcttttaattcagcgggtgcctgtccggaatgtcatgggacgggccaaattcaaacgctagatgatcgcaaaataattgcggatgaaaatctcagtattgaagacggcgcaatcgcttcttggcgtttaccggggcggaactttatgccaacggtcgccgcacatatcggggttcgaattgatgtgccgtataaaaatttgacggccaaggaaaaagaaatcgtcttgcatggtaagcggaataaatacgcggtcgattttcacacatcaaccggtcgcgtctttagtacggaaaatacactctatgaaaatgcctacgacgccgtttatgaatctttaaaatcggtcaaaagtgatcgtgcgatggccaaggtcaattctttttttcatttttcaacttgtccaacatgtcacgggacacggctcaatcccgaactactaacgcaaaccgttggcgggcaaaatattgcggcagtttctgatatgacgctaggggcattagacacttgggtaacggctactaaagccgatttaccagacgagatgcaacaaatggcaaccattttgtttaagaacttattagaaacgttgcagccattactgtcattaggactcgactatttaacgttgtcacggaatgggaacacattatcgactggcgaacttcagcgaattcaattagcgcggaccttaagaacggcaacaaccggtgttttgtatgtcttggatgaaccgtcaatcgggttgcatccggataacgttgaaggtttaattcatattttcagacagttagtggcgcagggcaattcattagtggtcgttgatcatgaagtcaacatcattagccaagcagactgggtgattgaaattggtccggcggcagggcgcaaaggcggtcaggtgattgcacaaggcaagccggccgatttagtgcaagacccacaatcattaattggaccatacattgccggtcgacccaatattttgtaccccaaagttgcaacgcaagctacgggtgttcgaacgacaatgacagttggacagtattttaatctgcgtgatgtgaccattgaaataccggataatcaaattacggcggtttctggtttctcgggggccggtaagaccagtttaatcttggatagtctggtaccggcgattgaggctcaccataagcatgagcaacttccccaacaggtgacccagttgacgaccgatttaacgtcagtcgtcagcattgatgctaagccagttggtaaaaatacgcgttcaactttagcgacttatactaacatcatgacgaatcttcgaaaattatttgctgggctaccggaggcacaagcccacaattatgggattgcccatttttcgtataacaataaagaaggtgcctgtcccaattgtggtggtctgggcagtattattttggatattcaatacttaccagatatggaagaagtttgtccagaatgtcagggtaaacggtataagccggcaattgaggtaattaagtggcatggtgatagcatcgtggatttattggccttatcagtagaagaagccataccggtttttgcggatgtgcccaacatcttgaaagaactgaagattctcaaagagatcggcttaggttatttgcaccttggtgaaagtaccccgagtctttcaggtggcgaagcgcaacggctaaagctagtgacgcatttgaataaaaaacgggccgggacgttattcgtcttcgatgaaccatctgttggtttgcatccacgggatgtggaaaccttgatgggcgttattaatcaattaaaagccaaaggcgcaacggtgattatgattacccacgaccttgatttgatgacgaatgctgattatttaattgatttaggcccaaaaggcggcagccaaggtggccaagtgatggccagtggaacgccatctgaattggtcgcttcacagactgaaagcttaacgttaagttatctccgggcacattttaaaaagtttcaactaaatagccattaaaaagcgctagttttaatggcaaataaaaagtcgcagtcatttgactgcgactttttttaaattaagattctttagcaactggacgccagaggcctaagatcaaagcgctgatgaatgtcccgattaatacagcaaggacaaagagtaaaccgtggttagcaagtggggctacgaaaatcccaccatgaggtgccggaacagtgatttgccataattgggttaaaccaccaccgattgctgaaccaatgacacttgaaacgataacgtgcaatggatctgttgcagcaaatggaatagcaccttcagtaatgaatgaaatccctaagacgtagttagcaaaggcttgtttccgttcactacccgtaaatttgtttttgaagattgttgcagcaaccgcgattgccaatggtggcaccatcccaccagccataacagcggccattaatgagccatctttagtggttgtgaagacaccgattgcgaaggtataagcggccttattgaaaggaccacccatatcaacggacatcataccgcctaaaatcgcaccaagcaataaggcattgccagcccctaagtgcgttaagaatgtgcttaaccagagattaatttgagcgaagactgggttgaccataaagaacatgataaagccaacaatcaatagaccaagaacagggaaaatcaggattggttttaacccatctaatgtttgtggtaagttcttgaagactttcttcaaaccaacgatgacccaaccagcgatgaacccagcagctaaaccaccaaggaaaccggcaggactatcagaagaaatcacactagctgttgcttgactggccatatacccgccgacaaacccaggcattaaagcggggcggtcaccgattgaaatcgcgatgtaagcagcaagaactggaattaagaagttaaaagcattattacctaatgagttcaagaaaataaaggttgttgaatgagcgccaactgtttgttccaataggaatgagatggccattaaaatcccaccaccgacaacgaatggtaacatatttgaaacaccattcattaaatcttggtagatacggctccaaagtgttttcttatcagctgaagcttcttcgcttgcttgtgattctgttgcatggaagattgaaccttcttcatccaatgttttttggatcaattcggcaggttttttgataccgtcgataacagggcggttcaagagatgtttgccgttgaaacgaggcatatcgactttcttatcagcagcgataatgacacctgttgcacggctgatatcatcggctgttaattggtgtttaaccccttcagaaccatttgtttcaactttgatatcgatgcccattttagcagctgtttctttcaaagcagcttcggccatgtaagtgtgagcaatcccagttgggcaagctgtaacagcaacgataaatggtttttgttcatcagcaggtgttgcagcagcggcttgtgctttagcagcttcttctgcttcttccttagcgtcttcagcatctttggctgcttgggccttagtaaagagttcttgaacatcttcaggtgtttgggctagtttcaaatcagccactaattgtgggttgattaaaagtgatgaaagaccagctagggcttgtaaatgcgtatcgttagcgccttctggagcagcaatcatgaagaacaagtaaacgggttggccgtctaatgcgtcatattcaacaccattttgactcttagcgaataaaacagttgcgcgttgaacagcgctatccttggcatgaggcatagcaatgccttcgccaatcccagttgatgattgggcttcacgagccaaaatatctttacgataaagggtatcatctgtgataacaccgatatctttgtagcgggcaaccatttcatcaacagcggcttctttagtcgttgcttgtaaatccatgatcatcgcatcttttaagagtaaatcttggatgttcataataaatctcctttgtgtttaaaattaatcaacttgtgtgatttcaatttgtggtaagagttcgttaatcttagcgctagtcgctaaatcttctgaaaaggctgtggcactgccacaagcaagacttgttttgaaagcagctagtgcatcgtgatgttgcgcgaatgtcccgacaaagccggcaatcattgaatcaccagcaccaacggaattaatcacagtccctttaggggtgccaccgagataagcgtggtctggtgtaattaagagggcgccatcaccggccattgacaccagtacgtgttgggcacctttgtctaataatttgcgtccggcagcgatgatttcaccttggttagcaaattgtgtgtcgaataattcagctagttcatggtggttgggtttaatcaccaatggcttttcagctaaagtatctaataaggcttgaccagttgtatcaattacgaattcagcattgtgcgcttgaatcattggaatcaagtctttatagaagctagcaggtaagttaggtggcaaactgcctgacatgaagacgatatcgccggcttctaatttagccagttgttgcttcaagttatcaacagcaccagctgaaatgtgagggccttggccgttgatttcagtttcttcaacgctatcttttaacttgacgttaatccgtgtatcttcttcaacttctgtgaagcgacagtcaatagatgcattattgagtttgttttggatgaattgaccggtgaagccaccgacaaaacctagcgcaacactagggagtgctaattcagcaaggattcttgaaacattaatccctttaccaccaggtagcttcacgtcagattgaacgcggttgacgttacctgtatttagtttttcaagttggatgacgtaatcgattgatggattcgccgtaatcgtataaatcactataaaacctcctgtaaatctgtatgtgtttgataagtttgatgtagtgcaggggagagttgatcggtaatcagttgaacttgcgtaagttcggcaaatttactaaatgaaacggcatcaaattttgtatgatcagctaggaccatcgtttggttagcctgttgaatcgcgaatcgcttgagcgttgcttcttcaggatcgggcgttgttaaacctgaatattggtcaacaccgttagttcctaaaatcgcttggttaaattgaaattggagcagtgtttctaaggcgcccgcaccgaccatcgctttggtcttatttttaacccggccacctaataggtaggtttgaatatgatgatcagctaaaagtgaagctgtatcaacaccgttagttacaacggttaaattcatttcaggtgttaaataagggatgattgcttgagttgttgtgccggcatccagatagatgacgcaccctaattgaatcttagaagctgtaaacttagcaatttcatttttttcgtgaacgtttttgctcgttttttcgatttgccctaattcaacctgtaatttattgaggcgtttagcaccgccatgaattcgagtgaccaatccttgttcttccaaaagttgaaggtcacgacgaatagtggattctgatgcgtctaataagcggcataacgctttcattttgacgacatcttgttgttgtaataaatccaggatggcttggtgccgttcttctgttaacatatcaaaaacctccgtgcattcattatgtcatcgtttacaataaaaagcaaccaaaatatttcaaaaacgttcaaaaacaatcaaatgaatttaaagagaactgaatttataattgtgtaaaggttttcattgatgagtcatctatgataaactaaaagatgttagggcggtatagcccaatttttaggaggtaatagacatgggaaaattaggcgtttcaatttatccagaacgatcaacttttgaaaaggatgcggcttatctagaccttgcacatcaatacgggtttaaacgagtcttcacatcattattagaagtcagtggtgatcaagatgcggtgcttactaatttcaagcgcgtggttgattatgcaaatcaattagggatgcaagtgatgattgacattaatcctggtttgtttgaacaacttggtatttcctatgatgatttaagtttcttccatgaattaggtgcttggggaattcggttagataacgggtttacaggccaagaagaagcgaagatgacccgtaatccatacgatcttaaaatcgaaattaatatgagtcaagggacaagctatgttgacaatattatgagtttttcacctaaacgggctaacttattgggctgccataacttctatccacatcgttattccggtttaggggaagacttctttaaccaatgtacagcgcaatttgcacagtataatttaaatacggctgctttcgttaattcacatgaagcgactttcggaccttggccaacacaagatggcctaccaacgatggaagttgatcgggacttagcgatggcgacccaaatgaaacattacatgttaatggataatatcgatgacatcattgttggcaatgcgtatgcttccgaagcggaactaaaaacaatgcaaacggtctttaatgcagaattcccagcgattatgattgatgtggctgaggatattacggctgatgaacgcaaggtattatttgaaagcttacacagttatcgtggtgaccgttctgaatacatcctgcgttcaacaatgacgcgggtcatttataaagacttaccatttgcagcccacaatacagttgatataaaacggggcgatatcttgattgacaatgttggctacggccaatacaaaggcgaaacccaaattgcgcttcaagcaatgccaaatgatggtcgggtaagcgttgtgggccatattgcaccagatgaattattcttattaaaatatttaaaaccttggagctcatttaaattaatcccgaatgcacaataagcgttatactgaagacgatgattaatgcgtcttctttttttacttaaaaatcattaattagaagactttatgattgattatgacgttgtctgtttacttttagcctaaatttaggtagtatataaggtactgtttagaaacgagaaggagtcaaaataatgtttgtagatcaagtcaaaattgatgtgaaagctggtaaaggcggcgatggtgctgttgcatttcgtcgtgaaaagtttgtgccacttggcggaccagccggtggcgatggtggtcgtggtggtagtgtcattctagtcgtagatgaaggtctacggacattaatggacttccgctaccgtcatcactttaaagccaatagtggtggtaacggtcagaataaacaaatgtatggccgcggtgccgaagatacatttgtccaagtgccacctggtacaactgtccgtgatgccgacacaaatgaattgctaggcgatttaacggaagatggtcaagaattagtgattgcaaagggcggtcgtggtggccgtggcaacatgcatttcgcaaccgctaagaatagtgcccctgaaattgctgaaaacggcgaaccaggccaggaacgtagcattcaactcgaattgaaagtcttagctgatgttgggttagttggcttcccatctgttgggaaatcaacattactttctgttgtcacaagtgctaaacctaagattgcgagctaccaatttacaacattggtgcctaacttagggatggttcaactggatgatggccgtgatttcgtattagccgatctaccagggttaatcgaaggtgcctcagatggtgttggtttagggattcaattcttacgtcacgttgaacggacacgagttgttttacatttaatcgaaatggacgatcaaactggtcgtgatccatatgaagattaccaacaaattaatcatgaattagaatcatatgatccaaaaatcttggaacgtccacaagtgattgtggcaactaagatggatctaccaggctcagccgaattattagctgaattcaaacaaaaattagcagcggctggtgatacacatgagattttcgaaatttcaagtattacgcatcaaggtgttcaaccattgatgaacaagacagccgatttattagctgaaacagcagaattcccaatgggtgatgttgaagaagcacaaacacaaaaactttatcaatatcaaccagaaggaccagcctttaacgtcgaacaagatgaagacggtacgttctacatcacaggtgaaaaggttgaacgtctcttcaagatgagtaacttagatcatcaagatggtgtgatgcgttttgcccgtcaattacgttctatgggacttgacgaagcattacgtgaaaaaggcgctcatgatggcgatttagtggcaattgataactttacgtttgaatttgtcgaataatagggttcaaaaaggaagaaattcgactctggattcttcctttttctatagcatcaatataaaaaagagcttcaagtaggcagtggtgggaaacattgctataatgttttatattagaatatagagtaggttgagaaaatggcagggaaaaagcgcttaaataacagtcgttatattactgggtttgacggattacgggctattggggttatcggagttattttgtatcatttgatgccgtacacttttacaggtggttatctaggcgttccgattttcatggtggtttcgggctatttgattacggatttactggtccaagaatgggaacaaaatcattggattaatttgaagagtttttatttacgacgtgttaagcgactctatccgggtttattgacgatgttgtttgcgacaggtgcgtatattactttatttgaacggcagatgttgcataacttaaatcaaattattatcactaatattttgtatgtttataattggtggcaaattggccatggtcaatcttattttgatcggtttgctaataatgaatcaccctttacacatttatggacgctttcgattgaaggtcaattttatctgttatggccgtttgtcgttgtcgcattaattattggctttaagaataaaggccggattgcccgtgttttattaggtgctggtttagtttcggcaatctggatggccattctatatcatccaaatgcggatccaagtcggctttactatgggacagatactcggatgttctcaatcttggtgggggctgctttagcttttgtctggccatcgacagctttgaaacaaaagattattccgcgccaacgatggaccttagatggcattggtcttttgagcaccattacaatgttgatcttaatggtcaaaatgaatgcagaaagtgcctttgtttatcggggtggcttattcatctttagtttactaatctgtgtcttggtagcagttgttgcacatccaggttcagattggaatcgcctattaaccaatccagtctttaactggttaggaaaacgcagttatgggatttatttgtatcaatttccagtgatgattttctttgagggcgtctttaaaaatgttgctgcacatccggctttatacccagtgatcgaagtcgcgattattttcggactaactgaattgtcatatcgctttattgaacaaccattggcccattatccatatcaagaattagggcagagaatgcgtcaatttgttaaacacccaacgttaaatcggcaatccggtttagtttttgggatggcaattgtctttttagtgggccttgtaggtgcgattcaagcaccggggcaaccagcgccggatgctcataaatcggcacttgcggttaatattcaaaagaacaaaaaagaaaatgatgctcgtaataaagccttagttgaaaaggccaaggctcaaaataagcaacagaaaaaggctaaatcaaaagcacaagctgataaagaggccgaagcagcggctcaaaaacacccagttaaccaagaatatgagaagtacgggttaacacaggttgaattgcaaaaagcccaatcgatgccaattacagcaattggggattctgtattgctcgatgctggtaaaacgttgcaaacactgttccctaatatgttggtggatgcctctgtcggtcgccaattgaacaagagtacgccagttgttgatagctacgcccaaaaaggcgcgcttagcgatacggttctaattagtttgggaaccaacggctcatttacccaagcgcagttagatgaatttatggctgccattggtagtcaacgtaaagtcttttggctaaatgcatacgtgccaacgcggccttggcaaaatgatgttaatcaaatgcttaaaggagccgctaaggagtatccaaatctaacgattattaattggtacgatcaagcaagaaaacacggtgactggttctatgatgaccaagtgcatcctaatccgattggtgtgaaagaatatgcggcgatcgttacaaaagcgttagttaagcagtaattgatttaaatttaatatagaatggaagagttagatggaattagaatttcttggtactggtgcgggtgttcctgcccgtcaacgtaacgtcacgagtattgcattaaaattattggatgaacggaatgaagtgtggttattcgacgttggtgaagcaacgcaacaccaaattcttaaaacaacgttaaaaccacggaaagttaagaaaatctttttaacgcatttgcatggtgatcatttattcgggttaccgggcttcttatcaagccgttcatttcaaggtggcgacgaaccgttgacgatttatggccccaaaggaacagaagaatacgttcggacgagtttaaaactttccgaaagtcacttaacgtatgccttgaagttcgttgtattaccagaaaatggtgtcattattgatgacaaaacattccgggtcgaatgtgcaaaattggatcaccggattgcaagttacggttttagaattgttgaaaaagatcatcctggtgaattacaggttgaaaaactacaagctgacggtgtcccttcaggtcccgtttatgcccggattaaaaatggtgaaacagtcacattgagtgatggccgcgaaattgacggtcgtaactacatcggtaacgcacaaaaaggacggattgtgaccattattggcgatacccgcaattgtgaagcaattacgcgcctagccgaaaacgccgatgttttagtccatgaaagtacatttggcaagcaagaacaaaaaattgcgcgtcaatactaccattcaactaatatcaatgcagccaaggttgccaaaacagcacatgtcaaacgcctattactcacgcatatttcagcccgttatttaggccaagctgtgcgtgaattacaaaatgatgcccgcgatattttcaaaaatacgcgtgtcgttagcgatttagatttgtatgatattccatttcatggtcggaaggagtaattaaaatgcaaaatttagcagcattacaagacttaaaacaaaagattgtggtggttacagggggttcgtcaggtttaggccgggcaattgcctatgaagcagctagcaaaggtgccattgtcgtcgttttagcacggcgtcaagcagctctagaagcggttcgtgacgaatgtcaacggctctcaggccaagcagcttatgcttatcaattagatgtcagtgccccagaagcgattgaagcagttgttgcgcaattaacaacagaagtggggataccggatgttttagtgaatgctgctgggtttggtcattttgaagaagcgctagcaacaccgatgcctttggtggaacagatgtttagagtgaacgttttaggcttgatgtatttgacgcgggccattggatcacagatgatcgaaaaacaacgtgggcacatcattaacattgcctcaatggccggtaagatggcgacacctaaatcagcaatctattcagcgactaagtttgccattgtaggctactcaaacggattgcggcttgaattgaaaccatttggtgttcaagtgacaactgttaatccaggaccgattgataccgccttttttgatattgctgatcaaactggtaactatcttaaatcggttaactggatcgtgcttgatccagatcaactcgcacacaagattgtgggggctattgggcatcctaagcgcgaaattaatgcaccgtggttgatgtcactaggcgcccaattttatcaattggcaccccatattggtgactacgtcgctggtaatttgtttaataagaaataggaggttgtatgatgaaaaagcaaggtcgtttaattacaattttaattctcgcactaatcgtggtggtttttgccgttttgaatgttaatccagttgccattaattttggctttacaacggttgattggcccttgattatcgtgatcgttgtgtcgcttttaatcggtgcgattatcacattcttagccgcaactgggagttcattgagccaacgtaaggcgcaaaagcaatggactaaagaaaaagcagatttagaacaaggtcaagaagcaaaaatcaaagccgcagttgaagcagaacaagttaagcaaaaagcaacgtatgataaattattggctgataaagaggctgaattacacgaaatgaatgccaaaatgaagcaattaatgcaatcaaaagaagtttaatttaaataagaggcactaaccgaatttattttggtgggtgcctcttttttattagacttaagtcctatctttgagcattagtcttgaatgtttgacctattttgactatcatagaattagtcaatcagtattgacgtttaattcaaaaaataaacctaaaaaggaatgacgtttatgaatccagaacaaatgacacaagctgttcaagatgcaattgcagaagcacaaaatattgcaaaaacgcgtcatcaaacagaaatcgatgtcccacatttatttaaatatttaattcaaccccaacaactgggtcggcaaatctatcaggaagcgggaattgatttaaccgcacttgaaagtgaaattgatcgcgagattgatacgattccaacagttgaaggtcaaacaaactatggtcaaaatatttcacaaaatctctatcaagttttgaacgcggctcaaacttacatgcaagagtttcaagatgaatttttatcaactgaaacggttattttagggttgatgaagtctaaatacaatccgttagtacaatttttacaaaaaaataacgtcacgactaaacaattaaaagatattattaccaaattaagaggaggcgagcgtgtgacatctaaaaaccaagaagataactaccaagcgcttgaaaaatacggcactgatttagtgaaagctgttcgtgaaggtaagatggatcccgtcattggtcgggatgaagaaattagaaacgtcatccggattctttctagaaagaccaagaataacccagttttaatcggcgaacccggtgttggtaaaacagcgattgttgaaggcttagcccaacgaatcgttagaaaagatgtgcctgataacttaaaggataaaaccatcgtctcacttgatatggggagcttaattgcgggtgctaaatatcgtggtgagtttgaagaacgactaaaggcggtcttaaaagaagttaagaagagtgaaggtcggattttagttttcatcgacgaaattcacacaatcgttggtgctgggaagactgaaggcagcatggacgccggtaatcttttgaaaccgatgttagcgcgtggcgaattacacatgattggcgcgacaacgcttgacgaatatcgtcaaaacattgaaaaagataaagccctcgaaagacgattccaaaaagtgttaattcaagaaccaaccgttgaagatacgattagtattttgcgggggttaaaggaacgtttcgaaatcttccacggtgttcgtatccatgataatgccctagtggcggctgcaacgttatctaaccgctacatcacagatcgcttcttacctgataaggcaatcgatttagtcgatgaagcgagtgctaatatcaacgttgaaatgaattcgcaacccactgagctcgatcaagcaacgcggcaattaatgcaattggaaattgaagaagcggcattgaagaatgaaacggatgcggcttcacaaaaacgattagccgaaacgcaaaaacaattagctgatttacgggaaacgacgaatagtttgaagatgcgttgggaaaccgaaaaagctgatttgaacaagattaacgacaaaaaggaagaattagaccaggcaaaacggcaattagaagatgcccaaagtaactacgatttggaaacagctgctaaattgcaacacgccaccattccgcaattggaacaagatcttgctgaccttgaaaaggctgaaaaaccagaggattggatggttcaagaatcagttaccgaaaacgaaattgcgacagttgttagttcgcaaactgggattccagtcgctaaattagtagcaggtgatcggcaaaaactattacaattagctgatcatttacacgaacgggtaattggtcaagaccaagctgttgatgcggtcacagatgccgttttaagagcgcgtgctggcttgcaagaccctaatagacctttaggctcattcttgttcttaggccctactggggttggtaaaacggaattagctaaggctttagctgaagacctcttcgattctgagcgacacatggtccgaatcgatatgagtgaatacatggagaaatactcagtatcgcgacttgttggtgcggcacctggttatgtcggttatgaagaaggcggtcaattaacggaagctgttcgtcgtaatccatatacaattgtcttgttagatgaaattgaaaaggcccatccagatgtcttcaatatccttttacaagtcttagatgatggtcgtttgaccgactcacaagggcgtacaatcgactttaagaacacaattatcatcatgacctctaacctgggttctgaaatcctcttggacggtgttgatgatcaaggtcaaatttcaaaagaagcagctaatagcgttcaaaccttaattcaaacgaaatttaagccggaattcttgaaccgaattgatgatacgattatgtttacgccattgagcttgcaagatgtcgaacaaattgtagttaaaatgttggctgatttatcacatcgtttagcagatcaagaaatcacattgacgatttctgaagacgctaagttatgggtcgctaaagaaggttatgatccagcgtttggggcacgaccattacggcgttatattacaaatcggattgaaacaccgttggccaaagaaattattgccggaaacgttttacctaacacaacagttgaaattggtctaaaagacaatcaattagtatttgaaaacaaagcaactgactaatttttgcaagaagctttttcaaaatagtcggattatgattgatttatcaagatttgtattatacaattacgtgtaatcagtgattgactttgtgtttattaaaaataagattaaacatgaattcgaggttgaaatgatgagtttcaatctcgaattttgttttgattgaatgccttgagtagattgttttttatgaaataacttgctcttgttacgtaaacatagtattatagaagtcgcggacaaaagtagtgggacgtctaattgattttaaatcaatttagcaaagattgatttaatccttgctaagttccctgagttcggtatatcattaatgaatctaagatataaaggagtctgaaaataatggcagttccagcaagaagaacatcaaagacgaagaaacgtatgcgtcgtggacatatcaaattgaacacaccaaacgtacaattcgatgcaactaatggcgaataccgtgtaagtcaccgtgtttcaccaaaaggtttctacaaaggcgaacaagttgttacaccaaaagctaacgactagtcttagttaagaggttccttcgggaagctctttttttatgccttattatggtttttgaaactagatgatgatataattgtaattaaatataaggaggctgattattatgaataatgagctattaaaacgagacttaaatcaactacaactattacaattacctcgctggacagatttaccaggtttgaatttatatatggaccaagtcgtcagctatatcaatcaatatttagaagtattggatctagatgaaatcactgctgcgatgatcaataattacgtgaagaaggggttagtcgttgcgccggacaagaagcgctatgctaaacaacaaatctcacaagtcttgattattgcgttattaaagactaatttttcaattgaagaaattggccgcttactgtcagtgggaacagcgactgatcgtaacgaaaagcaactctatgattattttattttgacgttcttagatgcgattcatcaattggacgaagaatacagtccatttgaacaagggaccaaacctgctaacggcttagtgactgaaacccaaaaaacattattgaagttagcttgtcagagtgtggtttataagattgcgattcggattaccgttaaaaaggatcaaacgacaacgttaaaatcggctgataaaaaataagtaattgaaaagattattaatttttggttaaaaaacaaaataattagattagaaaacgaaatagagcgtttacctaaaccagtttgcaccgtaaaatgaagatgactagttagtttgttattaatttaataatgaacaatattaggcaaatggctattattcttagaccattaaactatttgaaagaggtgtttggggtggcagaaaagaaaaagacgagtaagttgactttaggggcacttattctcatgattttcacgtcagtctttggttttacaaatattccacgagcgttcttcttaatgggatatgcatcaattttttggtatgttttagcagctgtaaccttctttattccttacgcatttatgcttggggaaatgggcgctgcctttggtgaagctaagggtgggatttattcttggatggaaaaatccgtcaatgctaaatttgcctttattgggactttcatgtggtttgcgtcatacatcatttggatggttaacgttgggaacgggatttggattccattatcaaatgctattttcggagttgataagacgcaaagttggacattctttgggctaaccaatggtgtgcaaacattaggaattcttgctattatttggattattgtgattacttttgtcacatccaaagggcttgataaagtcaaaaaagtaacaagcatcggtggttcagccatcacattgattaatgtgatcttattcttaggtgggttattaatcctgatcctaaaaaagggtgttacagcacaaccaatcacggctaaggcctttttccaatcacctaacgaaagttatacatcaatgattcaggtctttagtttcgttgtatttgcaatcttcgcatatggtggtttggaagttgttggtgggttagttgatgaaacagaaaatgctaaagtcaacttccctaaagggttagcaatttcagcaatcgtgattgcaattggttatgccatcgggatcttcatgatggggacatttactaactgggatttcgtcttcaaaacaggcggcggttttgctaaagtaactggctcaaatgccgaagttactttagggaacgttgcttacattgcgatgaataacatgggttaccaattagggcttgcgcttcatatgagtcatcacgctgcaattcaagttgggatttggttaagtcgttatatgggtctttcaatgttccttgcacttactggtgcattctttacattgattttctcacctcttaagacgattatcgaaggcacaccagctgaattatggcctaagtcattcgctaagaagaacaaacataacatgccagttaacgcgatgatcgtgcaagctgcgattgtaattgtaattatcgcttttgttgcctttggtggtaagagcgctgctaagttcttcgaaattttaacagccatgacaaacgtttcaatgacattaccatacttattcgttgcctttgccttctttggttttaagaaggataacagtatcgaaaagccattcacgatttataagggtaaaaccttctacaaattctgtgtttggatggtaatgttcacagttgggttcgccaacgtcttcacaattattcaacctgcaatcgacggtaaccttggccaaacattctggtcaattgccggtccagtcttctttacagttgtcgcattgattatgttcaatcgttacgaaaagaaaacaggcttaaaataaaaagattaataaaggtcaccggatctgcggtggcctttttggatggcggaaatatttgtgacacgtcgtcgttttgacttgaaatgttgttctaaaagggttacgctaaaagctcattaacgataatttctatgaaaaggtgacgaaaaatgaaaaaaacagtagttggattagtcgtgagtttgggattagttagtttactagcgggctgtggccaagcaaagttaacgacttctaaaacaaattaccatcaaaatgggatggtcgcagttgtcaaaggtaccactaataaaaaggcgcacttaagctatcaaattgaccaaggagcaacgcataaaacaagcgttagagaaggcacatacgttgttcaagtaccaacaacaaccaaacaacaaacggtcacgttaaaggctaaaacgggctcaaagacgattgaaaagaaagttacggtggcagcaggcaccgctgttggtcaataccaagcgattgccgacaagtataatcaagctgttattggcatggcgttatcaaaggcagaccaagccaaagcgcaaagcttacaaaaacaagcggcagcagccaaagccggtcaattggcaccagcccaattaatggcactccaacaaacgcaaaaagatgttcaagcagctatgcaacaagctaaaacggctaaaaaggatcaattattaccagcaaaaccagctgacggcgttcatcaattggtgaaaactgataacgttgtgatccgaggggcaattgctgatcaagatgtgatgggacttactttaatcgcaccaattaaagcgcttaaagataaagcggctttgaaggaattcggaacgagttttgcgttactcgctcaatcaacaggtgcggattctaagaaggtcatgtctgaatttagtaagtttacgaagaagaataagaagagcaaccaaacgacaatgaagaccattacttcaaatggcgttaagtttaataccggcttttctgcaagtcatttatacatctacattacaaaataaagcaaaaaaaaggacgacccaacattttcgttgagtcgtcctttttgtcttatgctgctgggtctttaggtaaaacaaggggtactaggttgagtaaaatcccaaagatgactgagacagtcaacgttgcttgaacattaaagtccaatttaactaacttagaaccgatgaagccgacaacgaatccgaagattagcgtccaaaaaagcgtcataacgtatttcatgattgaccttctttctttcatgcaattctatgatattgtaacacgttttacaacgagattcatttgaaataatttgttatactggaattattagaatctgtcatcagaaagaaggggcgttcttggcatttgtgcaactccaggttaagagtacctatacgctcttagaaagtaccactaaaattacggatttagtaacagccgccaaagcgcgtggctatcagagtttagcgttaacggataagaacgttgtctatgggttagttgatttttataaggctgccaaagcagccgatattaagccgctattggggatcacaattgaagttggcggacttatacagactgacgaacggtttccgttgattttactggccaaaaatttaacgggttatcaaaatattttaaaaatttcaacgaaaattatgacgcaatcagaattagtcccatttgaggcggttcaatcactattacagcagttggtggttatcacgccgagtcaagatggcgagttagtacgcttgttattgcaaaacgatgcaacggcagcacagacctatattgagcgattaaaggcggttgtcgatgcagatagtctttatctagggattagtgctaaacaagccgctagccgacagcgagtgcctctgggacaattaagccagcaaacggcagtaccgctagttgctttaggggacgtgcggtatttagaaccggaagatgcatttgcggttcaagtcctgcaacatattaaagcgggtacgcaggttaatctccaaacaccgcaagcgccaggtggctactttttagaagatgtgcagcaggcaacggccgcctttgaagcgttacaactggcagaagccgtcgctaatacgcaaaaaattgcggctcaatgtcaggtggatttatcgttcaaacgggcccagctcccccaatttgagacaccagcggggcaatcagccgccacttatttaaagcaacagagtcaagcgggcttgcaagcgcgttttaagacacagcctattccagaaacttaccagacacgattagactacgagttacaggtcatcaacgagatgggttttgccgattattttctcattgtcgccgatgtgatgcaatacgcccaccaacaaaatattatgacaggtccagggcgtgggtcggctgccggtgcgctagtggcatatgcgctacggattacagatgttgatccgattcggtatcaattactgtttgaacggttcttaaatcctaaccgggccaatatgccggatattgatttggatatcccggataaccgtcgggatgaagtgttagattatgtttatcaaaaatatgggcaaaatcacatggcccaaatcattacgtttgggaccttggccgctaagatggcgttaaaggacgtcggtcgggtctttggcctcagtcagtttgaaatgagtgcttggtctaaggcgattccaaacgttttaaaaattacgctccaagaagcttacgatcagtcgcaagcttttaagaacctcgtagcagattctcaacaaaatcgcttactatttgaaacggcgcagcgaattgagggcttaccacgccattattcaacccatgcggcgggaattgtgttgagccaagcgccattaacggaaaccgttgcgctgcaaagcggtggcgatgaaattgagttaacccaactaccaatgggcaatgttgaagaactaggattgttgaagattgacttcctgggtctaagaaacttagggattttagcgaatattgttaaattagtcagccaacaaacaggtcagccttttaatccgcaaaatattccgttagatgacccagcaacgctagcgttatttcaacaaggcgatacaaacggcatctttcagttcgaatcaacagggattaaaaatgttttacggcgcttgaagccgacttcttttgaagatattgtcgcaaccgatgcgttgtatcgaccggggccaatggaaaatattgataccttcatcgatcgtaaaagtggcaaagtgccggtgacctatccggatgattcgttggctgagattttgcaaccaacttatggtatcttggtgtatcaagaacaagtcatgcaggcggcttctaagatgggcggttttaccttaggggaagccgatatcttacggcgggcaatgagtaagaagaaaaaagcagtgattgatgcgagtcgaaccaagtttatcgaaggcgcgctggctttaggtcataccgagcaagccgcgacaacggtctacgactatatcgaacagtttgccaactatggttttaaccggtcgcacgcggtcgcttacagtaaaattgccttttggttggcttatttaaaagttcatcaaccagaagcctttttcgcagcggttttaaatgccgtcttaaatcaaggaacaaaaactaaaacgtatttagcggaagcaaagaagcgacaattatcagtcttaccacccgatattaatctcagtcagcgttattttaaggtgacagatgccgggattatttttggattatacagcatcaagggtttacgacgggattttgtagcggcaattttggatgagcgccaaacgggtggtccgttcaaatctgtgttacagtttctacaacgactagacgcgaagtatctcaaaaaagaggcgctagtggcgttgatttacagtggggcctttgatcaatttaatcccaatcgcaacgcacttttgatgaatctcgatgatttattggatagtgttaagttagctggcgataatatgtcattattcgaaattctagcacccaaagaaaaaacggtgtctaatttgacgttaacggagcgcttggacaaagaagcggagtacctgggggcttatctttcagggcatccggtagaaaagtatgaacgtgtccgtcggtactatcacgtgccggaagttagtgacttagcacccaatcaaaatgtccgactagtcttatttgtccgccgaattaaggtgattcgaacgaaaaaaggcgagcaaatggcttttgtgacgggacaagatgccaccggcgagattagtgttacgctgtttgcatcggtttatcggcaagtagcagattggctgaccaaagaacaagtgattttagtcataggaaagacggaacaacgccaagagttgcaacttatcggtaatcagattatgttagcggaacaagcgcaaaaagggttgcctaaggccacgctttatttacgactatctgcggatttaacgcgtgaacagcaacaaaaaatgtaccaactactcgaaaaaagtcgagggccaatcccggtaattctctataattcagcaacgaagaagtcaattcttttgaacgaacgctattggattgcgaacgatgaaaaattaacgacggcgcttacaaccttactggggcctacaaacgttattttaaagggctttagttagtttagttttgaaaataagtttgttaaaaacttctgaaaagacaagacttcttttcagaaaagtgataatatattagtgactttgaaagaccaaatcggttttttaagtaaaatatttgcctggggtgaaaagatgaaacgcataggtattttgacaagtggtggggatgcacctggtatgaacgctgccgtccgtgccgttgcaagaaaagcaatgcatgaaggccttgaagtctatggtatcaattatggttacgctggcttagttgctggtgatatcttcaagatggatccaattacggttggagacaagattcaacgtggtggtacattcttatactcagcacgttatccagaatttgcacaagtcgaaggacaattgaagggtattgaacaactcaacaagttcggtatcgaagctttagttgttatcggtggtgacggttcttatcacggtgctcttcgtttgactgaacatggttataacgcaattggtcttccaggaacaattgataacgatattccatttacagatcaaacaattggctttgatacagctgttaacacagttcttgaatcaattgaccgtatccgcgatacggctgcaagtcatgaaagaactttcgttgtggaagtaatgggccgtggcgctggcgacatcgctttatgggctggtgtagccggtggcgcacaagacattattattccagaacgtgatttcgacgttaaggccgttgctgaaaagctacgtgcttcacgcgaacatggccaaaaacatgctattattgttttggctgaaggcgttatgcatgccgatgaattctcagaaaaactttctgaatacggcgatttccacttacgttcaactgttttaggacacgttgttcgtggtggttcaccaacagctagtgatcgtgtattagctagccgcttaggctcaaaagcagttgaattattgcttgaaggcaaaggcggggttgcacttgggattgaaaagaatgaaattatcgcacatgatatgttagacttattcaatcacaagcatcacgcaatgttagatctttatgatttaaatgaagatttagcttactagtattttatagttctacccaaaattcgttaaaatgactgtaaagtcttttaaaaaaacagacataaaaggagagattccacttatgaagaaaaccaaaatcgtaagtacacttggacccgcaagtaacagtgttgaaatcatcacaaaattaattgaagcaggtgctaacgtattccgctttaacttctctcatggtgatcatgaagaacatttaagccgtatgaatatggttcgcgaagctgaaaaagctacgggcaaaactgttggtatcatgttagatactaaaggtgctgaaatccggacaactgttcaacaaggtaagaaatttgaattacacactggtgaagtggtacgtatttcaatggacgatactcttgaaggaacacctgaaaaaattgccgttacttacccaggtctatacgacgatactcacgttggtggccacgttttaatcgatgatggtttagtggatcttaagattattgaaaaagacgaagcaaacaaagaacttgttactgaagttcaaaacgatggtatggttggctcacgtaaaggtgttaacgcacctggtgtttcaatcaacttacctggtatcacagaaaaagatgctagtgacatccgttttggtttagacaacgatatcaactttatcgctgcaagttttgttcgtaaacctcaagatgttttagatatccgtgaattattagaagaaaaacacatggaacatgttcaaatcttccctaagattgaatcacaagaaggtatcgacaacattgacgatatcatgaaagtttcagacggtttaatgattgctcgtggtgacatgggtgttgaaattccatttgaaaacgttcctttcgtacaaaagaacttgatcaagaaatgtaatgctattggcaaaccagttatcacagctacacaaatgttggactcaatgcaagaaaacccacgtcctacacgtgctgaagttaatgacgttgctaacgctgttattgatggtactgacgcaacaatgctttcaggtgaaagtgctaacggtgactacccagtagaagctgttgcaacaatggcccgcattgatgaaagaacagaaaaatcattaacagatcgcgatgcatatgcattgaaagcatacagcaagactaacttgacagaatcaattggccaagctgttgcacatactgcacgtaacttaggtatcaagacaatcgttgctgctacagaatcaggttctacagcacgtatgatttctaaataccgtccacaagctgatatcttggctgttacatttgacgaacgtacacgtcgtggtttaacagttaactatggtgtatacccagttatggctaagaaacctgctaatacagatgatatgttcaacttggctacacaaacagctcaagaacatggttttgctaaagaaggcgacctaatcttgatcactgctggtgttcctgttggcgaacgtggcacaacaaacgttatgaagatccaattaattggttcaaaattaacacaaggccaaggtgttggcgatgaaacaatcgttggcaaggctgttgttgcttcaaatgctaaagaagcagctgaaaaagctgttgatggtggtatcttagttgttaaagcaactgacaaagattacttaccagcaatcgaaaaatcaagtgctatcgttgttgaaaacggtggtttaacatcacacgctgctgttgttggtatcgctatgggtatcccagttgttgttggtgctaaagacgcaacagaagctatcaaagatggcgaagttgttactgttgattcacgtcgtggtattgtttaccgcggtgcaacaaacgctctttaatcatacgctgattaagaaagaaaacaccctcaaaatttgagggtgtttttttgtgcgcaagtcgctttttgatttgaaaattttgttttctgaaattacttttatgaaaatactgacaagtcgcctaattatcggtacaatgatagggagactttattggaggttcacatggaaagttggttatttttagcagcgattttaatcgttgccttattagcaaaaaatcaatctttaatcattgccaccgcagttgttttagtcttaaaggcattaccaatttctgaaaaagtattgccggttatccaggctaaagggattaattggggcgtgacggtcatttctgtggccatcttagtaccaattgcgactggtcaaatcggttttaaagaattaatcagtgcttttaagacaccggcaggttttattgccgttgggtgtggcgtgttagtcgctgttttgtctgcaaagggtgttggcttgttagccgctagtcccgaaatgacagtggcgcttgtatttggcacaattatgggcgtcgttttccttaagggaatcgcggctggaccagtgattgccgccggtatcacctacaccattttaacaattttcaatttagtaccaatccattaagaagaataaagaggttaactatgaacgaattaatcggacaagtgattacagcacttgtaacagatgaaaatgaagaagcgtacttcgcccaaaaagacggcgtaacgtttgaattaaagaaagaccatttagaagaagaattagcaatcggggcaacagttaccggttttgcatatgaaaattcaagccgggaattagttttatcaacggttattcctaaatcacgtgtcggtcactttgcttttggtgaagtcgttgaaacacgtcgtgatctcggtgtttttgttaatatcggcttacctgataaggatattgtggtttcgcttgatgtgttaccaactatcatgaaattatggcctaaggttggcgatcgcttgatgattgcaatcgaagttgatcaaaaaggtcggatgtggggccaattagccgacgaaaatatctttagagctatttctaagggtgctaaacaagaaatgaagaaccaagatattgaagggaccgtttatcgtttgaagatggcagggactttcttattaacagatgatttctacattggctttattcacccctcagaacgtgaagcagaaccacgtcttggccaacgggttaaaggccgggtcatcggtgtgcgtccagaaggtagtttaaatgttagtttaaaacctagagcctatgaagaaatcggtgatgatgccgaaatgattatggccgtcttaaaacggcaaccaggctacgcaatgccatatactgaccgtagtaatccagaattaattaagagttattttgggattagtaagggcagtttcaagcgtgctttaggccggttaatgaagaatggtttcatcgtgcaagaagaaggcgaaacaattttaacggctaagggccaaaaagatatcgaaccaattgttgataacgatcaagaccaagattaatttaaattaatgacagtaatgccgtgatttattaaaaaaaggaagtctctattgatgagtaaggctgagcagttagaacaaatcagaaaacaattgcaagaagcgggttataaattgactgcccaacgagaagcaaccgttgcggtcattttagaatgctcacaggcgcatttaagtgccgagcaaatctttatcaagactaaagccgaagtgccagagattggcttagcgacggtttaccgaacactagagatgttaactgagttacacgttctgaataagattagctttgtggaagatggcgtgacgcattatgatttatgcgaagaaaatgccagtcagcatttccaccatcatttgttatgcttacaatgtggggccatcgaagaaattcatgaagacttattggtaagcgtcgaacagacggttgctgagcggttctcatttgctgtcttagatcaccgcttaacccttcaggggatttgtgccaactgtcaagctgccaattcggctaatgggttaccggccaatcagctagatccaagtaagcaagtggatattagccaattgtaggaggggtttgtttggatgatctaattcaagattatttacattatctgaagattgaacgcggcctttctgaaaatacgcgtcagagttaccggcaagatttgaaacagtatcagcagtttttagtgtcacaaaaattgacgtcttttacggaagaccgatttattgttttgggtttcttacaggcccaaacgacggcccaaaaggcgcaaagcagtatcacgcgtagtatttcgacattgcgtaaattctatcaatatttagcgcgtgagggacgtattcaaaaagacccgatgctgcagattgattccccgaagcaaggccggcatctgccggctgttttatcatcagaagagattgaacgtttgttaaagacaccggacacgagtacaccattaggccttcgtgaccgggcaatccttgaagtcttgtatgcgactggtttgcgggttagtgaactggttcatctgaaattgacggatttgcatttatctctggggttaattcagaccctaggtaagggagataaggagcggattattccgatcggcgatgttgcggtggactggattaatcaatatctagaacgtagccgcaatcggttaaccaagggcaaggattcaccttatttgttcgtcaattttcacggaaacgggttaacaagacaaggcatttggaagaatttaaaagccattgtccaggccgcaggaattgataaagatgtgacaccacatacattgcggcattcttttgcgactgttttgcttgaaaatggtgctgacttgcgaattgtgcaggagttattgggccattctgatatttcaaccacccaaatttatacgcatatcagtaagaaacatctcacggaagtttatcagagaagtcatccgcgtgattaggttgatttgtcgtgttttctaatttatggtagagtattgctaacagaactttgtttgatcattggaggtcaacatgttatttaagtacaagaatgattatgaaaaaattgcgatgggctttttatcgtttattccagatttaaaagaagtaagtcatgtacagtcagaacttgctttttacaatcaagacgatcaacacgtcttatacctttggcaaaatgatgagggcgacttcgccggcgtcgtaggggtcgagattggcactgattttattttggtgcgtcatatgtcactaagtcccgctgaaagaactgatactaatctattccggatcttgaatgaactggcagcactttatcctgataaccgtgtcatgggatcattggatacagcgcctttaattgctaaatgggagcaacagcagactaaagaaatggattaatgtaacgcatgactgaacaattaacgttaattttgacggattttgaaggaccattagatctattattacatttgattaatcagactaaaattgatatttatgatattccaattgctgaaatcaccacgcaatatctagactacttgcaccagatgcaagaattgaagttagatattgcgggtgattatttagtaatggcggcgaccttgatgaaaatcaagagtaagttgctcttaccagcaccaccggcaatggctgaaaccttagaggaagactatgttgatcctcgtcaggaattggtggaccaattattggcataccaagcttttcaaaaaattgcgacggtcttacaagaacgagaatcagaaagacaattattatttgcgaaaccggcaagtgctaatcctgctgaaaaagtggtcccactggcgcgtggtgtaattaagccgcgtgatctagctgctgctgtgtctaaaatgttggttgaagcaactgttcaacagaccgattttaagacggttcaaaatgatgaaattacgattgctgaaaagatggattggattatcgattgcttaaaaacacgagcaacaacgacttttgaacagttggttatcaaccgttttgatcgtgaagaaatcgtaacgacctttttggccgtcttagaattgatgaaagaacggctgattaattgtgaccaagcaggttatgatgaacagatattagtgacattgaaagaaggtattgcagatgaaccatctcgctgaaattgaaagtttactctatgttgccggcgatgaaggtattacgttgcaacatatcgcgcgactcattatgttagacgaggctgcagtacgacagttactaacgaaattagcaaaacgttatcaggaagatgaacaatctggtcttaacctgattcaagcggctgattgttataaattagtgactaagaaggcctacgcgggtttattgaaggcctattttgatggtcccgtttcgacgagtattagccaagcagcacttgaagtattggcgatcatcgtttatcggcaaccactcactcgaattgaaattgatgaagtgcgcggtgtgcaaagtagtggggcaattcaaacgctacttgccagacaattaatcgttgaaaaagggcgtaaagatgcacctggtcggccgattttatatgggacgagcgattatttcttagattactttggcttaggctcgttaaaagaattaccagaactagaacaaatgacattaacggacgatacggcagaatcggataatgattctgcggatttatactatcgtcagtttgaacagacattaaatgaaacgggaccagagacggcccctaaaggagaacaataactatggaacgactacaaaaagtcatcgcaaatgcgggggttgcctcacgacggaaggctgaaacgctaattgcgactggtcacgttactttaaacggtaaagtggttaaggaaatggggattaaggttgatagtacttctgcgcatatcgaagtggatggtgtgccattaacgcgtgaaaaaaaggtttattatgccctttataaaccgcgccaagtgatttcagctgtcacggatgataaaaagcgccgcgtggtcacagaataccttgaagatattcaagaacgcgtttacccaattggacgtcttgattacgatacatcaggtttattactattaaccaatgacggtgacttcgccaacatgatgatgcatccaaaatacaaggttgataagacctatgttgcgaaagtatcaggtttaccaactgcagaaatgctccgtcaattacggaaggggattatgcttgaaaaacgtaagacggcccctgctaaagtgaaaatcatttcaacggatcgtcgcaagaatacggctattttaagtattacgattcatgaagggatgaatcatcaagttaagaatatgttagctgctgttggcttacccgtttctaagttaaaacgggaaacatacggcttcttaacgttagatggtttagtttctggcgaataccgtgctttgaaaccaatcgaagttgcagaattcaaaaagatcgctgaattaaatgaaaaaccaaagcataaaaacagaccaaaattgtcacgacatgactaattagttgcttttcgcacattggtttgctatgcttattgcgtaataaaatattatggttcgtcttcaggggcagggtgtaattcccgaccggcggtaaaagtccgcgacctgctgcaatgttgattcttgtggtggctgaactggtgtgatcccagtaccgatagtgaaagtctagatggaagaagatagggcttatttgagtatgaacgtattcaactaaggtctgttaatcaccctgattagcaggcctttttaggtacaatcgactcagcgggtccgctgacgaaggcaacctcatacggagggtgtttgcaatgcgtgtttcaaaagtacggacaatggtcggggtcgccatgttaggggcaatctcatttattgtcatgtttttcgagtttcccattattttggcttttccatttctgaagatagatttcagtgatgtgattgtcttgttgggaacctttatctacggaccaatcggcggaatcggagtcgcggtaattcgttcgttactccatttcatcatgactggtgctagcttacctagtttagttggcgattttgccggtgtgatggcatctattttttatctattgccattttattatctctttaaccgccaaaagagtgtgctgtgggggcaagtgattgccggaacagtcagttcgatcagtatgacaatcgtgatgtgcttagccaactggttattcatcttaccgatgtatattaaactattgaactttaatttgggaatgtcgatgactaaatacgtctttatcggactagtaccttttaatttgattaagggtgcgttggtcacagtcgtctttgcagttttatatctcagaattctaccatggttaaaacaacatatgaaaacagcaatctaaatataaaagcctaccgcaaaatagcggtaggcttttattagtttagcgacaaaacgtgtattatttgtctgaatatgctacgatgaaaatggctcctcttgacggacgattgcgcgggtcggacaagcggtataagcggctttaaaagcgattagatcatgcggattttcgatgggagtttggccggcattattgtccggtttaaaaaaagcaaccccttcgtgatcgtagtcgaagagttcaggcgcctttaactggcataacccgcacgcaatacagcgttctgggataactttactatagagcattattttcacactttctagattagaggaattattaagatgttaacagactatttactctgtttatttgcgacggcaccccgccgctaccaagccatttattatacattggtcggtaagcgtaccacatccaacctgtatgctggtttagcctatggtttattaaagtggcttcagatttatcctaatctagaattagcccaatttcaagctgaattaacacaactacaagaaaaaggttggttaatggttgaagatcggcaagcttggttgacaccgactggtgcggctcaaaaggctacattgatgacgactttggagtggccaacgcattattatggcccagaaatgggtcatttacagcagtttcaaagccgcttgtttttggcgattcaaattatgtcggaatatagtcaccataacacacactattttccaattgaaactagcatgcgtgatcgtgtgcaagttgtcagttggtttaaacagcataaacaagattcagagatggtcactcagtttaaacaagaattacaacagatcttaacgcagttaacacctgttcaggctgatttattagcgaatcgcctagttggccatcaaataattgggcagagtcaacagcaattggcgcaaaaactaaccttagaaccactgaccgtaacgattcggctgttagatgcgcaagcccatttttttgccatcctcagccagcacacaaccgactatccgttattagcgtgtttattgtcaccactggattcaaccttgagtttaagcacggcacaaacctggacactgctgcaacaaggacagtccattgaaatgattagccaaaaacgccgggttaagttaggcacgattagggaacacattttagaaacggcaatcctgcagccgcagttcccgtttgagcggtttattagttcagatttagagaccgctttggcggctttgatgactgagatgccggatttaacgtttaacgttgctcacgagcaattaccgacactggattttttcagttatcggttatatcaaattaaaacgaaggtggtggccgcatgacttctgaacaactcatttatgaccagttagcgcagcactttggctattcaacctttaaaccgggccagttagcggttattaagtcggtacttgctgggcaggagacattagccgttttaccaactgggaccgggaaatcgctgtgttatcaattaccggcctatatcttggggcatacgactgtgattgtctcgccactaatcgcattaatgcaagatcaggtcgcccaattgaattatcaaggggaaaaacgagctgtcgccattaattctaatttagtgcctcagcaaaaataccagttactgacgcatttagcggattaccgctttatttttatggcaccggagactatcagtcaaccagaagtgattcaggcgcttcaacgttgtcaaatcgatttgtttgtggttgatgaggcccattgtatttcacagtggggaattgactttagaccggactatttagttttagcagccattaaggcccaattacagccaactgcaacactggctttgacggcgactgccaatgatcgtgtacgccaagatattttgaataagttggcgttaaaaaacgcggcccaaatcatgacctctgttgatcgccccaatatctatttgggcgtgagccaacaacctgatgaacaagcgaagaaccaatttttagccaacttagtgaaaaaaagccagggtcccgggattgtttatttttcaagtcggcaaaagacaatggcgattgcaacctttttacaacaggagactgatctaaaaattgcttattaccacgcagcgttatcaacccaggagcggtatttaattcaacaacaatttatgcaaggacaactcgatttaatttgtaccaccaatgcttttgggatggggattaacaaagcggatattcgctttgtgattcattatcacttgccacaaaatatcgaaagttatctacaagaaattggacgagcaggtcgagatgggcaagcagcgtatgctttagtcctaacaaccccgcaagatttatatttacaacaatcactcgtatcatttgggattccggaacccggactcattcggcgctattatcaggaaccgcaattatttaaacaaagtcaaggcagtgaatttgaactgttgcgtcgttaccaacaactggggatgaccgaagaagaggtgactgccttattggataatcgccaaactgaaaaacaattttcattacaaacaatgttggattatttgacgctcaagggctgccggcgtcaatttattgtgaactattttgaccaggcaccaaagacgattgaacacagcgaaacgtgttgcggggaacaggattcgaccgactttttagcacaattagacttagaacaggctattaattataaaaccgctgaaaccgttgttctgactggttggacgggaatcttggaccaattattttagataaatttaaagttttttagaaaagtctgtggtacaatatcaaagaataccaatagggagggccgtcaatgctcaaagatgataagaaaaaacaagataatccgacggaagaaaaaccctgggaaagccagttcgacgatgatcgggatgacaaaggaaatttatcccgcgttgctgccaagagtaaggaaaaaggaaatacatattttgctattattctagctgtattattagttttaatgatcgcatttccaattatcgcttacaccgttcattctagtcgtgcgaaccgccccggtttagaagattctaagattgtcgtcaaaaccgctgatagcgagaagagtaagagtaaatcaactgctaaaaaggctaaagaagccagtgaaagccaagaagcagctgaaagtaaagcagccagtgaaagtaaggcgaaggctgatagtgaggcagctagtgctaagtctgctagcgaaagtgctaaagcacaagcagctagtgaacaagcagctagtgaacaacaagctgccgctgatagtgctagtcaacaagctgcttcagaatctgctgctagttcaagtcaagctgaagcgtcaagtagctcatcttcatctgaaacagcgggtggtacttatacccttaaacaaggtgaaggcctttaccgtgctgctgccaacaacggcatgtcattgagtgaattattagcattgaatccaggattaacagctaattcaagtgttgcaccaggaaccgcactcaaggttaaataataatgctagacagaaggcctggggattctcccagccttttttaatgatttttttaggaggatttacatgcaaattgcaattgatggaccagcatcgtctggtaagagtaccgtggcgaagattgttgccactaaattagggttcgtttatgttgatacgggtgcaatgtaccgttcagcaaccgtcttggcacaacaactaggcctcgattatggtgatgaagccggtttgatggctgaattaactaaagctgatattcagttccaaccagatgaagctggtcaaaaagtcttcttaaatggtttagacattactttagcgattcggacaccagaaattacgaataatgtctcacaagtttcagcattaccagcagttcgaacagaaatggttgatcgtcaacgccaaattgctgaacaaggacaagttgtcatggatggtcgcgatattggcacgactgttttaccagatgcaaaagttaagatttttatggtggctagtgcgaaagaacgtgctaaacggcgttatgctgaaaatacagctaaagggattatgaccccattagcaacgttacaagcagaaatcgaattacgtgatcaaaaagacagtacacgggcagtttcaccgcttagaaaagctgacgatgcaatcgaaattgacacgacaaagctcttaattgatgaagttgttgctgaaattttaacgattgcgaaacaaaatatgtaattttatgggttaatcagataaaaaaactggtaatccattgccatatcaactaaaataaaggatgtatagatagtcgttaaggaggattttagctatgaatgatgctaatttgaatgacacccaaagcagtgaaacaatggcagctgctttagatagtgtccatgaagtcaaaattggggacgttgttaagggtgaagttttagtaattgaagaccgacaagtcattgttggtattgaaggaactggcgttgaaggcgttgttcctcaaaaggaattatcaagtcaaccaattgaaacattaacggacgctgtcaaagttggtgatcaatttgatttagttgttattgcgacaatcggtaacgacaaggaaaatggtagctacttattatctaagcgccgtttagaagcccgtaaagtttgggcagaaatcgaacaaaaatttgaaaataaagaaacaattaaagcaacagttttaaacgttgtcaaaggtggcttagttgttgatgctggcgtacgtggctttgtacctgcttctatgctttcagatcgtttcgttcgtgatcttaatagctttaagggtcaagaattagaattacaaatcattgaaattgaaccaagcgaaaaccgcttaatcttatcacgtaaagcattagtagaacaagaacgtcaagcacaacttaaagccgtttttgaaaaactattgcctggtgatattgttgaaggcgaagttgcacgtttaactaacttcggtgcctttgttgacttaggcggcgttgatggtttagttcacgtttcagaaatctcatacgatcacattaaccaaccttctgatgtattagaagttggtcaaaacgtgaaagttaagattcttagcttagaccaagaaaaaggccggatttcattatcaattaaagatacacaacctggtccttgggatgacatcgctgaaaaagcacctgtcggcagtacattggaagggactgttaaacgtttaactacttttggtgcgtttgttgaagtcttccctggtgttgaaggtcttgtgcacatttcacaaatctcacatcaacatattgcaacaccaaacgatgttttagaagaaggacaaactgttcaagtgaaagtcttgtcagttgatcctgaacaacaacgtttaggtttatcaatcaaagctttacaagaaaaaccagcaggtgctaaggattctgaacaagaagacgttgcaccatcagattacgaaatgccagaagaagaaactggctttagtatcggtgatatgcttggtaaagcattagacgaaaaatagtttgtaaaatcgtattgaatgcttaataggcttaaggtagggtctgggacgaaactaggtttttgtcccagaccctttcctgatagtcgctaaatagactaatcgcgggacaaggggtcgctttgcttaaagcactttttgtccttgtgttattttgcggacttttttcgcaataacgtgcttgtcgtcaattgatggacaaggtaaactgaacaatgaagggaatgaatacaatgtcaaaaccagttatcgcaattgttggccggccgaacgtcggtaaatcaacaatttttaaccggatcgcgggcgaacggatctcaatcgttgaagatacgccaggtgttacacgtgaccggatttatacagcaagtgaatggttaggtcatgaattcagtctaatcgataccggtgggattgaaattagtgatgcaccatttatggaacaaattaaacaacaagcagaaatcgcaattgatgaagcagacgtgattatcttcttagtgagtgccagagaaggtgtgacagatgctgatgaacgcgttgcacaaattctttatcgcgctgacaagccaatcctattaggggttaataaagccgataatccagaacaacgtcaagatatctttgatttctacagcttaggctttggcgatccaattcccgtttctggtgcgcatggccaaggggtcggggatttattagatgccgctgttgctaaattcccaacggatcttgaagaagaagacgacgatagtattaaatttagtttaatcggtcggcctaatgttggtaaatcatcattagtgaatgcgatgttaaaagaagatcgtgtgattgtttctcaaattgaagggacaactcgtgatgctatcgatacgaagttcatggcggaaaataatcaagaatttacaatgattgatactgccgggattcgtaaacgtggtaaggtctacgaaaatactgaaaagtacgctgttatgcgtgctttacgtgcgattgaccgttcagacgtcgtattagtcgtcttgaatgctgaagaaggtattcgggaacaagataagaaagttgctggctacgcacatgaagccggtcgtgggattatcatcgtcgttaataagtgggatacgcttgaaaaagataatcatacgatgaaggaattcgaagaccatattcggaatcaattccaatacttagactacgcaccaatcatctttgtttcagctaagacgggtgttcgtcttcaaaacttaccagcaatgatcgaattagtcagtgaaaaccaaaacagacgaattcaatcagccttattaaatgacgtcttgatggaagccacaacggtcacaccaacgccagcgattaacgggaaacgtttgagaatttattacatgacacaagtggcggttcaaccaccgacatttgtcgtcttcgttaatgacattaatctattacatttctcataccaacgtttcttgaagaatcaactacgcaaaacgtttgactttaccggtacaccaattcatttgatccctcgtcaacggaaataaacaaatttcgaagttgataagctaatatgattaactaaattggaaagaaagccctttttttagcgaaaatccttgctatcactaggtttgtgtgataaatttaaaaatgaaatggtgatcaactcattgtttcgtcatttttgaccactcaaaaatgatttcggtatttattactgattatctgtgatgagcaggaggtgaaaaacatggcaaacaaagcacaattgatcgaaaacgttgcatcaaagactggtttaactaagaaagatgcaactgctgcagtagacgcagtatttggttcaatccaagacactttgaaacaaggtgacaaagttcaactaatcggctttggtacattcgaagtacgtgaacgtgcagctcgtaagggccgtaacccacaaactggtgcagaaatcaagattcctgcaagcaaagtacctgcattcaagccaggtaaagctttaaaggattctgttaaataagaattcatgagagggctgggattttcccagccctttttgattggttaaaagtcattttatggtagaatagataaatcgaaaaagggtggttaaatgacgaattcagaacaaatgctatcagcattagaagataacgatttaaaacaagccgatgagcttttccaaaaggctttaaaagaagacgatccagaaacgttgtacagtttggctgaagaactctacgcaatgggcttcttggaacaagcatcgacaatctatcaacaattattagcgcaatttccagatgaagatcaaattcggacgacgttggccgatattgcggtcagcaacggccaatacgacgacgcactcaacttactgacggatattacgccggaatctaatgcatacgcagaaagcctgttaacggccgctgacgtctaccaaacgatgggcttaccagaagtcagtgaacagaaactattgacggcgctgcgcctttatcccgacgaaccagtgatgcagtttgcgcttgccgaattgtactttgaaatgggtgaatacggtaaggcagctaactactacgaagctttgattgaccaagatgtgctggaattgggtcaagttaatattcaaaaacgcttggcaacaagttatgccagcagtggggcctttgaagaagcactccaaatttacgaaataatgaccgtcgaatttttaacggaagacgatcaattccaaatgggctttttatacctacaaatcaaggattatcaaaaggcaattgaaattcttacgaagctccaattagctgatccacaatacacatcgctttacgtttacctagcaacagcccaagaggctcaaaatgagcttcaagaggcgctcacgaccgttcaaaccgggattggctacgatatgtatagtgaggtcctctatcaaaaggggagcgatttagcccttcaattgggtgacgaccaagtggccgaacaaatgttaaacaaggccttggaaattaacccggataatatgggtgaaatcagtgccttgagtcaagtttatcgccgtcaaaaccgccatgcggaaaacgtggcctttgtgcaagaagcaattgccaaccataaaccaacggctgaactttattggtcattggcacaatcacaatttgcgcttgaagcattcgatgatgcacgtgaaaattatttgctcgcttatccggaattaaaggataacccagaattcttacacgacttaatcttattcttccaagaaatggcacaagtgccagaattattagcggctttgaaacaatacttgcaattagtgccaaatgaccttgatatgcagaccctctatgatgattatcaaacaatgcaataatgattgaaagcgtccgactattactttagtcgggcgttttttacgtctttagtcgcgtttaatctctctataaaagtgttacattgaagaggaatagggaattcgaattcatttggggaggattttataatgataaatacagtactttcagttgatcagttaacacaggtggtaccaattgggcagtctgaccgaacgacaaccatattgaaaaatatttcgtttaaggtccaaaaaggagaattggtgagcattgtgggaccctctggatccggtaagagtacgctattatacagtatttctaggattacgaggccaacaagcggcaccgtgacaattgcgggggttaatccgtatcaattgaaacctaatcaattagcggcttttcgtagacagataattggcttcatctttcaacaatataatttaattcagtcacttcctgtgtttgaaaatatcgttatacagcaacgactgagtcatcagcaaccgaaacgttctgagattgaacaattactgacaaaattgaactttgcaggtcaaatcgatggtgcagttgagaccttatcaggtggtgagcaacaaaaagtcgcgattgcccgcacgattctaactgattgtgatgtgctgtttgctgatgaaccaacgggtgcgctagattcggtatccaaatcgattatttttacatatttcaaagagatggttgccaaaggtaaaacggtgattatggtgacccacgatattgagttggctagtcagacagatcgtgcgattgtgttaaaagacggtcaggttcaacaaattgtgcctgaaccgtcacttgaggcaatctatgcagccttggataaggtggtgtaagcgatgtggacgatcagttggttacagttaaagcattcctggcgtcaatagctagcaacaataccggtttttgtaacggttggtttaatcctcggtttttgtttaacgggaattgtgaatgtggcggagtcgcagcaagttgatctatacggtcagaatacaccgctccctatttttatcatgcccatagtttttggtggcatcacaatgttaattgtgattaaaggaatcgtgaaccagcttttggatcagtttaaagcggactaccgaatgcttgcgattctaggtgcgacggtcaatgcattagccgctattttggggattcaaatcggaattgttagtggggtaagtgctctacttggcggagtcattgctttgccgctaacgcgtttttgttatgtttggttgcagcagattgttgggccccaaatgttgccgaatatgtcgattcatttttcgttcaaggcacttttgttaacggttatcctggctagtctaattgctggtagtggtggtttttggcatgcacgccatcaactaaaggatggaaataagcatcccagtcaccggcggcggatcgtttgtagaattaagatgattgttttgttaatggtcgtcattggattaatcattaaactggtgatgcaaattatgacgttaacctacgttgggcagtctgaaaaagtgattgtcggtctcggtaattctgttggtaatctgaatcttgtgttgttcttactactgattctaattacgcttaccgggcaaacagtattaaaactagctagccgaggtctctattggctaggtgctagaacgctctttttaaacttggcagctcacgatattgactatgctgttaaaaaatatttaccgttgtatacgccagtgacaatcattgcggttttaataacagggatgtcggcaattatgtggaatataccagcctatacagataccacaagtgccaacaatgagcgattagtgaatttcattttgacaatcggtttatatttaggcgcccctttgttgattgttttagcaaatgtgttggcgacgatgttagtcgcaaaggaggataatgaccaacagatgcgccaattacagttgcttggtttaacgcaacaacagttattgctgacacaacaattgaacgtcgtaatcttagtaggggttagtcttgtagcgagcctacttgcagggggcttagtttggggcttgacgattcatgtcgggcgaaccattttgcaccaagcgcccatttcaatgtcagctttgctggctggaccgttcttgatggcaagtagcatgttttgtttactaacgattgtgaacgtattccgcgtttatcatgggaattggctaaccaaagaataaaaagacagttgttgctttttgcaacagctgtctttttatttgttttgattgagagtaaggatatcctgtgcccaatcgcaccattctaattcggtggcacaaaccattaagcggcgtttcaagataaggtagcggcccaaattcttctgtttttcgattgaatctgtgatggcgtcgtattcttgcatcttatgttggtattgtttttgtgttttttggtaatggtgacgacgatcttgaagtaaagaggtggcctgttcttggttgaataaagcaatgacatacactttagctaaaaattcgtcacgttgagtagggacgtttgtttcttcttggaaccagtcagcaactacgagttgcccttcaggtgttaagtgataaatttttttttgcttgtgaatggcatcggtttcgactgatacgtagccttgttcatgaagtttattcaaagctgtataaatttggctatggtgtgcttcccaaaataaattaatatactgctttagctcataaccactgcaaggtttacgaactaacatacataataaaatatagctgagtgtactcatcttgtttcaccctttaatcaattaattattgcccagtataacatacttttctttcacaaacatgtcattaattcatgtcaaaaattagtgtcaaaattgacacgttttaaaatctagtgcactttatataaagagaaagagagtgatatgttaatggagaatcaaaataaagggctgcgatcagcgtatgccttggcttttacgtgtatggtcgcttttatggggattggcttagttgatccaattttaaaaaccatcgcggttaaattgaatgcaacaccagcgcaaacgacgctattatttacgagttatatgttggtgacaggggttattatgttatttactggtttcatttcgactagaattggtgccaaaagaacaattagtatcggtttaatcattattgtattatttgccgctttagcaggtcgttcacagacaatctcacaattaatttcgttgcgggccggttggggctttggaaacgcattgttcttatcgacagcgttaacggcaattgtcagtgtgatgcctgaaaaaacggaacaagccattatgttatacgaaggttcaatgggaatcggaatggcagttggtccgttagtcggtgggcgctggggagtttttcttggcgttttccgttttatggcgtagcaatcttaatgtttgtcgctgcgatgacgattgtctttttattagaaccaattgccaaaccagttaaaaaagcgcgcttttttgccggcgcggatgccttaaaaaatcatcgcctccgctcaatcggaattattgcgctattgtataactttgacttctttacaattttagcgtacgcgccctttttattagttgggctcactgaaatgcaagtcgggtttgttttctttggctggggaatcttactcgccattgcgtctgtttttgtggcacctcgcttagagcaaaaaacgaacacgttaacgacattgttgattgggttgggctttttcctcgtttccttagtagtgattgggattaatgctgatcaaccagtcttagtggcctttggcgtgatcatcgccggcttcttccaaggcttagtcaatacgctcttaacaacggttgcaatggaaaataagacgattgaacgcaatgttgcatcgtctgcctacagtttcattcggtttaccggtggggccattgcgccttttgtcgctggtaaaattgctgaaaaatggtcagcccattggacattttacttcgcaggtttgatgattctaattgggattttattcgttcttcgaaatcaacagtatttcataacggcggaggaagaagaaaaagaaattgaaatgatcgacggtaaagaattactataaattgaagacccttcagttagtgttatctaactgaagggtcttttttgatgtccaaacggttcagattttaaaaaggcagaaagaatgaagcgcaatattttggcaacgctttctcgggcttgataacattaaaatataatataaatgataaggagtggatatgatgaagaagcaattattgaaatggaccatcgttggcttttgttcagtattaggtgtgacagcattaggtgccggacaagttagcgcacacgggtatatcacatccccaggtagtcgagcgtatttaggtagtaatgcgttcacaaatgataccggtcaaaaaccattgaacaccaatgttggtcaagttcaatacgagccacaaagtattgaagcccctaagaatacatttatcgatggaaaattagcgagtgctaatatcagttcatttttgaatcttgatgaacaaacgagtacgagatggcatcaaaatcaagttaaatcaggcgcattaacgattaagtggcacttaacggcacaacataaaacaagtacgtgggactattacttaacccgcccaggttggaatccaaatcaaccgctaagtattttaaactttgaaaagattacttcgattgatgatcaaggaaagttaccagccaaagatgttgcacagacgattaatattccaaccgacagaagtggctataatgtgttgctgggtgtttggaatatttcggatacagcaaacgcattctatcaagcggtggatttaaatattacgaagtaaggaaattgggattattaaagatcaatagttaattgtgaaaaaaggacgattctttccaacgtatggaaagaatcgtccctttttattgttatcttaattaatggttttcttgtatctgtgtatttgctaagacaccaatttcatccgtgtgttcagaaccccattgctcgattgctttgattacaggtctaagcgattcaccaaacgttgtcattctgtactccgttttaacagggattaccggatatacccgtttagcgacaatgccgtctgtttcgagttcagatagttgttttgcaagcattcgttttgaaacatagggtaattttgcttgtagctcggagaaacgcaggacattatttttaaagatgtgataaagaatcacacttttccattttcctgatataaattgcaaggtattttgtacgggacaacctgaatcacaattataagcacttaccattaatatatccctccagtagaaaaggtaacttgaaaatttaagctctccgttaattatactactaccaaaggcggacaaataggtgaataaaaaggcaccaggtcactatttagacactagatgcacattatttcacgtcttcactttgaacttcaaatgattatcattaaaagtggaaagagggaatttggatgatgaatatgaataaggcagtgggattttacaaacatttaccaattagtaatcctgatagttttgaggatataatgtgccaactaccgacaattggagaccatgatttactagtcaaggttgaaggggtatcagtcaatccggtggatacctttgtgagatgtagtggtcgttcaacaaaaatggcgcatcccaaggttattggttgggatgctgttgggacggtcgttaaagtaggatcggagtgtaccttatttaagccaaatgaccaagtttggtatgccggtgatttcaaaagaagtggtagcgattcccaataccaatcagtagatgaaagaattgttggacctacaccccaaaatttatcgttacaagaagcagccgccattccgcttgttggattaacggcatatgaatcgttgtttgaaaaattagcattatcatgggatattttaaaaaataagggcaaaacaatcttaatcatcaacggtgccggtggtgtaggctcaatggccattcaactcgcaaaattggctgggctaagagtgattgcaaccgcctcaaatccagacgcaatagcgtgggtcaatcaactaaaggcggatgctgtcattgatcatcatcaggacttagtcaaacaaatgcatcatttaaaaataagagatgttgattatattttaaatctaaataacttagatgcgcattggaacgagatagctgaaataattaaatctgatgggcgtgttacagctactactgaaaatcataaattaatcgatttacaaaaactaacaaagaaacgcgttacatttagttgggagtggatgtattcaaaatcatactatcagactgctgatatggctactcagaaccaaatattaacagagctatgtcagttgtttgaaatggaaaaactgatgcctattactacgaaaacatatacaccaataaatgcagaacacctaaaacgtgcacatagggatgtggaatctggacatatgattgggaaagttacgttaacaggctggtaaagttaaaatataaaaggctgagcagttatctgctcagccttttttcgtctatgctatttaatctttcgttggtgtttcatacgtaaagccttctcctagtgcttcatggacgtcaataattgaaatgaaggctttagggtcttggtgttcaataattcttttgaggtgggccacttcgctagcgctgacgacacaataaatcatttgacgcgattggtgtgaataaccaccttcagcgtgtaagaaagtcacgccccgaccggtttgagtcatgatttgatcggcaatcttttgatagtgatcactgacgactaacaagcctttggcagcataggtcccttcgagtgtaaagttaacgacgcgggagaacacgtacgatgcgattagggtatacatcatgtgttcgatatcgaggtaactgagagaagctgttaaaacaaaaatatcaaaaattaatagggagcgtcccatttgaataccacgccgtttttcaataatcctagcaatcacatcactaccacctgtcgtaccaccatagcggtagatgataccactaccaaagccaccacacaaaccagcaagtagcgcggcgataaaaatatcatggtttaagttaatggtgacaggaactcgttgccaaatccataagaagacggacatcatgacggtaccgtaaattgtataggctaaggcgcgtttacctaaaaatttgtacccaagaattactaacgggatatttaaaattaaagttgtataggctggatcaatatgaagccaatagcgcacaattaaggtaatcccggttaagccgccttcagctaaataattttgaatgttaatcgtaatcaaaccaaaggcgtaaatcgcacaaccaatggcaatcgcgattaaatcacgaagagtggtggtcaaatttgttttttgtgtcatttgtcattcccccttactgtggtacctactattaaatatagcacggaatcgctgtcatgactaagccaattaagtttagcaaaggattgtggtatgataaatggataaaatgatgtaccaatagtgattagataagaggttgaataaatgaaattaacgacttttgcgcccgaatttgcagaagcactgccaatcctagaacaaattgaagcagctggttttgaggcttactttgttggggggagtgtccgtgataatttattgggcttaccaattcatgatgttgatattgcgacatctgcctatccagctgaaatcaaacaaatttttaagcggaccgtcgataccgggattcaacatggcacagtcatgatcttagaccatggtaatggctacgaagtgacaacttttagaacggaaaccgggtatcaagatttccggcggcctgattcagtaacgtttgtccgctcgttggaagaggatttgaagcggcgtgactttaccattaacgccttagcgatgcgcgcagatggtgaaatcatcgatcttttcgacggcattgctgatttgaaggcgcataaaattcgtgcggtcggtgtcgccgatgaacgtttccatgaagatgcacttcggatgatgcgcgcagttcggtttgagagccaactcggtttttcagtgactgaaaccacgcaagccgctattgaaaagcacgctgccttgcttgaaaaaattgcgattgaacgcattcacgttgaatttatgaagttgatgcaagggattgaacggcaaaatgggttacggacgtttattgacacgggcttatatcggtattgtccagatttggcagatcaattactggctttggaacgattaacggccttgccaacggaacagttgcatgatgaaagtgcggtttggttagtggtgacctatttactcgggcaaacccctgcacaagctggtcgctttttgaagcattggaagagtgctaatgatgtgattgatgcggttaaagccggcttagtcttactccctaaactattgacggcaactgccgaccaatgggacctttatcaagctggacaagcggtgttagtgattagtctgcaaatcgcacaattggtgacgactgcgacaattccaactgctgactggttagaacgctatgatcggttacaaattaagcaaaaagccgatttagcgattaatggtcaaatattgatgcaaaatggcttccaaccagggccgattttaggcaaaacactagctattttagaacggaaagtggtcctagacgagttactaaatacgacggaagcgttactaaaggccgctaaataaaaatgaaccactttttcaagacttgtgttaaaataagcatgtaagcacattcagaaagggtgacattgatggcacaacacgtttttaaagaattgaaattgtattttagaaatggtgacgcatggacaatcaaccacaaggaattgaacgatatttggattagccgggtaacaaccagctatggccgaattaacggtggcccaatgcaagaaattcatccatgtaagagttttaaagctgaaatcttaccagaagctgatcatgttaagagtgaagacattaataccggctcacttgaaatggggatgtttggtcgcgcaacgaagtatcaagatattgagaagttagatctcatttttgaagacgaacaagataagaaaccacttcaaatctacttcccattcaagaataaggatacaagcggtttagataacatttatcaaactagccaaatctcacaaaaaaatggtcatttatacatcgtcattgacgctacaagctcaattgccgatgaatatcctgaaatttaatgaccgcattaaaaccgattcgattatgaatcggtttttttagtgatttttaattgtcacccgccggattattcgctatgattgagagaatgaaagtaaaaggtgaaaaatattgcaaacattaacagcgacgaacttaacgaagacttatggcgaaaaaacgctctttaaagatatctcatttttaattcgcgaaggggatcgaattggcctcgttgggattaacgggactgggaagacgacgttattaaacgcgttaacggggactgattcttacgatagcggtcagattgaaacccccaatcaatacgcaatgagttatttagcgcaaaaaccggtttttgatactaatttgagtatcatggccgctatttttgcaggccaaaatccggtgtttaaaacgattcagaattacgaacgtgtcttggcagcttatacggctgacccaacgaatcctaagttgcaaacgcaatatgaacaagctgatgcgcagatgacgcaacaagatgcttggactgtggataccgatatcaaaacaatcttgacgcaattgcatttaactgacttagatcaaccgattaatacgctctcagggggccaacaaaaacgggttggtttggcacaagccttgattgaaagcccagatttattaatcttagacgaaccgactaaccaccttgattttgattctatcgaatggttagaaaaacgcttagcacaatacaagggcgcacttttaatcgtgacgcatgatcgctatttcttggatcgggtcgcgaatcaaatttttgaattggacgccggtcaactctatacgtataccgggaactacgaacaattcttaacacaaaaagcagaccggattgaacgcgaacaacaagccgcccacaaacaacaacaactctataagcaagaattgacgtggatgcgcgccggggctaaagcccgaacgacaaaacaacaagcgcgaatcaatcgctttaacgatttgaagggcaatttgacaactggaccagatacttccgaagttgatattcaaatggggcaatcacgtttaggcaagaaggtcttggaacttaaagacgctaacttaacgcttgatgctcatcctatcttgaaagatttcagcttgttagtgcaagccaatgatcgaattgggattactggggtgaacggagctggtaagtcttcattactaaatgttttagctgaacgaattccgctagatagtggtgaattggtcgtcggcgagacggttaacttgggctattatacgcaacaaaatgaagatttggatcttgataaacgggtgattgcttacctccaagaagccggtgaagaagttgtcggtaaaaatggggatcggattagtgtcacgcaattattggagcagttcctcttcgaccggtcaacacatgggacgttaattaagaaattatctggtggcgaaaaacgccggttgtatctcttaaaattattgatgcaacaaccaaacgttttattattggacgaaccaactaatgaccttgatatcgggacattgacgattcttgaaaactatcttgaaaactttaacgggaccgtcattaccgtttctcatgaccgttatttcctagatcaagttgccgataaattattggtactcgatggccatggcaatattacgacagaagtcggcttattcagtgactacttggctaaacaaaaaacagcgacaacaaaggcagtggcacctaagcccacacctgaagctactgtcgaaacggttaaggaaccagccgctaaacataagctaacgtataacgagcaaaaggaatacgcccatattgaaacagatcttgaaaaattagatgaacaaatcgaaacaatcaagactgagatgaatcaaaatggtgctgattacggtaaattagccgaatggcaagctgagttagaccggttaaaccaagaactagatgaaaaaatggcgcgctgggactacctaagcgaatacgcagactaaagaagtgcgtttgaaacggtttgactctgagcattaactggatttggcggattagcgatgcaatcgctgatttgacaaatatggttaagcgtaagagtcagtttcaaaaagcacgttaaagaagagaagtgtgttcagcccagttatgttccgagcactagcgcgttattacaactatcaaaaagggagtttaccatgtcagaacaagtatacctcgatttagcacggacaatcttagcagagggtcattacaaggaagatcggactaataccggtacttatagcctttttggctaccaaatgcgttttaatttacaagaaggattccctttattgacaactaagaaggtaccttttggtttaatcaagagtgaactcttgtggttcttaaaaggagattccaatattcgttatttattacaacataataatcatatttgggatgagtgggcatttgaacgcttcgttaaaagtactgattacaccggtcctgacatgaccgatttcagtcaccgggctcaagacgatgttgatttcaaagctgtttatcaagaacaaatgcgcctatttaacgaccggatcttagtcgacgaaggatttgcgaaacaatatggcgaattaggggatatttacggtaagcaatggcgcgcttggcaaacacgttccggtgaaaccattgatcaaattaaaaatgtcatcgaaatgattaaaacgaatcccgattcacgacgtttgattgtgtctgcttggaatccggaagatgtgcctagtatggctttaccgccttgtcacaccatgttccaattttacgtcaacgacggtaagctttcgtgccaactctatcaacgaagtggggatgtcttcctcggtgtaccatttaacatcgctagctatgcgttattaacgcatttgattgcccatgaaacggggcttgaagtcggtgaattcatccatacgctgggggatgcacatatttacagtaaccacgtgacccaagtgaaaacgcaattggcacgaccaatgcatgctgcaccccaattatggttaaacccagataagaagagcatttttgattttgatgttgctgatattaaagtggaaaattatgaatcagaacccgcaattaaagcacccgttgcggtataggaggtagcagatgatagcatttttatgggctgaagatcaaaacggcttaatcggtcaagacggacatttaccttggcgcttaccgaatgatctagccaactttaaacgcgaaacgattaacgaagcagttatcatggggcgcaaaacgtatgacagcttacctaaaaagccgttacccggccgtcaaaacattgtgataacacgccaaagcggtttgacagttgccaaagacgttttagtttttaatgagcgcacacaactgcttgattatcaaaaagaacatcccacgcaaaaattattcattatcggcggtgctgatatctttaaactttttgcggctgatgtcgactatttatacgttacgaagattgccgacaagttccaaggtgatgtttatatgccaacaattgactacacgcaatttaaattaatttcgcaacaagcagggacggttgatgaacgtaatcaatacccacatacctttgagatttatcaaagaataactgaataaacaacaaaaaggaacgtttactatcattgattgatagtaaacgttccttttttaattgtggcagatgaaccattctcggagtgtcgtcacaattgtttcaacaagcgggtgatcttttcgcagtgttgaagaaagatagatagttcgttcaattgagatgtccgcaatttctttgaggacgaagtgatcgttagctcgatatgaccaagaaatttgcgggaagaaggtgattcctaacccctgattaatgatggagcgcaatgtgccaggatcatccgttgttgaactaattttagggtgaatatgattagcttcaagcgccatatcaatcgtattacgaaaagcgttgctgggactcaacataataatgggtgtttgttcaatatcacttgtttgcaaaattgctttgtgagctaatggatgtgatttcgggatagcgactaagacgggctcttttataatcgggacattatttaaatccggctttgaatccgatgtaataaataaaaccgattcattaatattttctgggagatgatgttggataattgttaatttaatatcaggatgtttttctgaaaaaattcgaattaggtttggcaccgacacagaggcaacttctaaacaaagcgtcactgaggtgataatctccttatttaaggcagtaactgcgcgaaatccgtcatcaagaatggctagtgtcttggtaacgtaggggtagaaggtatgggcatatggtgttgcttcaatattacgaccggtgtgataaaacagtgttacccctaactcagattctagatgtttaatggcgcggctaagtgccggctgcgaaatatagagtgccttggctgcctgtgtaatattttgagtttcaaagacctttttaaagtattgtaaatgaattaatttcattattgaccaccttaattgatacctattagttatcgttctccattttttaagtattttttattataacagaactcccttaagattaaagggtaatcggtaattgcgaaaggaggagatttaatgagtacagcatttttatttccagggcaaggcagtcaacaagtcggtatgttacaagatattcctgttgaataccttgaacgtgtcgctagagtgacaggctatcaattaattgatattcctcagaattatgaggataccgtctttattcaattggcgttgttagtgaaggcattatttgctttagacgaaatccaaaagaatgagatcgtgcctgacttggttgctggacattcgttgggggcttttgccgccgctgtcgcttgtcaaacgttatcgtttgatgatgctgtgtggctggtttatcaacgagcagtattaatgaaggctgcttatccaagcggttatgcgatgggcgttattgttggattgacccgggatgaggcggctcaagtagttcaagaaacatttgatcctgattatccggtctatctttcaaatgagaactgcccaatgcagcatacaatctcgggtgccgtaattggccttgagaagactttggtggtagctaagcagaaacaagcacgaaccgctaaattattaaaggttccggtgccatcacattgtaagttgatgcaagcaaccgttgaaaaattaacgccttacattaaccaattgactttgcaaccggcgacttgcccgtacttaaagaatacggatggtcggatcacacaggatgcagaagctattcgtcaggatttgttggccaatattgaacaaccagtacaatggcgacaaatgatggccgttgctaaggaaatgggaatggatctgacgattgaatttccgccaggcaatacgttaacaaagttgattcatgctaattttggagagcagttaatcaggacgattaatattagccaacatggcattgatgatacaacgtttctatatcgaaaatggagatgaactagatggaaaaaccacaacgcaattgggacacgaaacgagttcaaaaagcacaacgattagccaaaatcagtcagttaatgactggtaaatatgttgaaacagaccaaattatcacagttctagaggccttaattgcccctggtgataaggtcgttttagaaggggataatcaaaagcaagccagtttcttgtcacaaagcttagagcaagttaaccctgaaaaagtaaataatttacacatgattatgtcgagtatttcacgtcctgaacatttgaatatctttgaacgccaaattgcttcaaaaattgatttctcatatgcaggggcacaaagtgttcgtgttgctcaaatgatagaagacggcaaaatgaaattaggcgatattcatacttatctagaactatatggtcgcttattcatcgacttaattcctaatgtcgtattggttgcagcagataaagcggacaaagcggggaatttatataccggctttaatacagaagaaacaccaacaattgtcgaagcagctgcatttaaagacgggattgtgatcgttcaagtcaatgaagtcgttgatgaattaccacggattgatattcctgctggctgggtggatgttgttgttccagcggacaaaccttatgaattagaagcgctctttacccgtgatccacaaaatattacggaacttcagattctaatggcaatgatggcgatcaaagggatttatgcagaacatggtgtccaatcacttaaccatggaattggctttaacacagctgccattgaactcctcttaccaacctacggtgaatcattaggacttaagggtaaaattgctaaaaattgggctttaaatccacatccaacaattattccagcgattgaatctggttgggttgaaagtatccatagttttggtggcgaagttgggatggaaaaatatatcgcagcacgtcctgatattttctttgtaggtcaagatggcaccatgcgcagtaaccgagttttaggccaagttgctgggcaatatgcggttgatatgtttatcggctcaacacttcaattagattatgatggtaattcttcaactgttactaagggtcgtctatctggttttggtggcgcacctaacatgggtcataatcctggtggtcgtcgtcattcaacaccggcatggcaatcattacgcgatgaagaaaatcctttaggcaaaggccaaaaactagtcgtccaaatggttgaaacatatggttctaataagaaaccagtttttgttgaaacattagatgcacttgccgttcaagaacaagcgagcctagcaaacgcccccgttatgatttatagcgaagatacgacgcatattgtgactgaagaagggattgcctatctttacaaggcaactagcaaagaacagcgtcaagccgcaattgctgcaatcggtggcgtaacaccacttggcatgacaagtactaaagaatcattggatcaattacgccaagctgggattgtaaaactgcctgaagacttgggtatcaaacgaagcgatgcaaaacgttcattattagcagcgcaaacaattgatgatttggttgaatggtcagatggcctatatcaaccaccaatgaagttcagaacttggtcataggaaagggagattatcatggaacaattagcttatcaatatcaaacaagccaacccattaataaacgagtgcacgtcggggtcgttggatcaggggatttggaaattttaatgtttccaaccaataaagctgaatcaacagttaaagtctgtaccggtagtgacggttttgatgaggtatggggaaatgtattaacacgtttctttgatcgttatccaatttcagccgacattgtgattaatgacttcggtgcaacacccggtgtcgtctatctccgattaacacaagcaatggaggaactagctgatgaaaaatagttttgtagaattaaaagcccgtgaacgagttaatgctttattagacacacctactggtcgcgaattagtcggtccttttgaccaaatgacagctcctaacttgattgctcaaggaattgttccagaaagtgatgatggcattattgtgtcacgtgggacgatttgtaataaagaagttgtcgtaatcgcaatggaaggcagtttccaaggtggtggaattggcgaagtttcaggtgcaaagattatcgctgcactaacacatgccttgactgaaaatcaaaatggtaatgaaattttcccaattatcgtgttagatactggtggcgtgcggctacaagaagccaactatggtctactttcaatttctgaaattggcaacttaatcgtggcacttaaaaagtacgtccctgtcattggggttgttcctgggcgagttggttcatttggtgggatgtccattacttcagctttaatgagttatttaattacgactaaaaaagcgcgggttggcttgaatggcccagaagtaatcgaacaagaagccggtgtccgcgaatttgattcaagcgacaaagatttaatttggaatacaattggtgctcgtcaacgcgttgaagctcaaattattgatgaattggtgactgatagtgtcgaaaatgttaaggctgcaatcgtggctgcaatggttgaacgtaaagatagccaccgtagtgaaaatgcggacttttacttgtcattattggcaaaacttgatctttcaaaaccaatggccattgaagactataatcaagcacttgccaaacaccaaacacaagcagttgaactacctgtggttactgaacaagcgacaccggcaacagccagtgttgggtacgactggttccaagcgctaactggtttaaagaatccaagttcaacaattagtactgtttattacggtgattcagatcgttttagtgaagatgctgtcgtaacgacgattgtaccagatagtaaaaatccaatgtaccgtgtacgagatggcgaagttggcttggtagaaggcttccggatggcacaaatcttaaatcacatctatgaagaagatcaaaataagaccgttaaacgaccaatcgttgtcgtcattgatgtccctagtcaagcttacggttataacgaagaattaatcggtattcatgtggcgctagcaaatagtgcagcggcttatgccaaattacggcaagcagggcacccggtaattggggtggtcgttggtaatgctatttcaggtgctttcttagcacatgggttacaatctagccggttaattgctttaaacagcgatgcaattactgttcaagcgatgtctaaagcaagtgctagccgaattactaaacgatcaattgctgaaattgaagcagcagcagaaaaagtaccttcaattgcctacgatatccgtaattataataaattaggtgccttgtatcgtttcttagacggtgtgacagatcaaacaacgacgactgataacgttgcaactgtgattgaagccgttaatgatgccattgaagacgttcgtcacacgagcgacacgatgttgacgaaccgttatacaaatgacattgctgtcaaaatgggccgtgttgaaactaataaggtccaagtaaaaatgaatgaagaatgggatgcttaattaaatgaaatctgcacatgatattgttcgctttgatcgtgaaattattcagcaaccaggtttagtggcccaattagcgctctctaaacaggttttcggtgttattcgtcggggaattgctagtcagtcaggtctcgtaccagtcggccttcgcggagtagctcggaatcaacggtttgctctcgaaattcctgatagtgcaattcaagctgttattcatccctgggaaattacgatgcgtgaatctttcagagttagtgaagtcgcacaatttccggtttacgcgcaatatcatgctgctagaaaaatattatcagggttcaaatggggtgttggtggcagcttagggtttgaattatcatctggcattagcgccattaagccgacgagtgattttgatttattgctatatgctaacgcgccggcagaattaccgcttacggtaattgctgccaatcattcttttttcgaacagtttgatacgcaagtgataaccgccaagggtggttttgcattaaaggaatatttgcgaacaccggctaaaaagatattattaaaaaccgatgcaggcccgctattaaccaaagaactttggtcataaatgagggtggaaaaaatgttcgaagatcagaagactaaaataaacgttagtgattttcaaaaagtatcagccgtgacggcggtcatgttacaaaccatattaagtttcgcattggctaattgtcataatcagacgaccgcggcttttgttggaacactttatgtatttgctaaatacacagcaccgatgtttatttttgccattgtctacaatatggttaaaaccagtgagaaaacatcttattttgaatttttaaaggataaattttttgaacttgttgtaccatacttactatggacagtcgcttatttattgattttcccaggtgtgcaacaaaaaacaccatacactaatatggggacctttttattgaaagttatcacaggtgatggtgcaccgcatctatggtatacggtcatgatgttacagattcaattattgatgccgttctttatttggttgggctatcgtgtttttgccaatcgtaaacttgtttggccggtactcataggtgccactgttctttatatcggatggtatctcttttatagtatgcaggttttaaacggcccattagctgaaagctggtatttattagaccgatttgtctttagtttcctaatttatgggatttatggcgttgccggttttatctatcatgaagcaatttttgagcagttaaatcggattcgttttgcattactcccgattggcttagtcgttggtggtttatcagtacgcgccttattagcttatcctggcgatgttaactttggccacgcgccttatttgaataccttgcaaagcttatacagtttgattattattctgacggtctttacgtttgcctcaagaatgattgttaatcaatcacctaagttacccttgttcaaatggctagcagtttatgcttatcggacgtatttagccaatgtttttgttttccaagccttattactagtctttaagtcaacttggttacgattaccaatggggacgatgattgtggtcgcatacttgagtatggcgaccgttgcgtttatgctcagctggctccttcatttaggatggtcagggattaaaaagcaatttagttaaggagtgtttagactttgataaataataagacacaacaaatgatgaccaaacaattggcttgtttagttgagcaagctttagtcgacgaggttcagttgagtcccaaacctggtttagttgatgcgcgcgataatggtgcgcatacggatatggacgcgtctttatttatcaagtcggcacaggctttgacgccgtattttgaacaaatggcacaagccgcatggtgtcatcctgtcgatcagacattacgagagacaatcgcacagatcggtcgatcagctgaacaagctatgtttgaagcaactggtggggttaatacacataagggcgctatttgggtgatgggtctcttggtgagcgtttatgcgcaccaaattagtatgcgtcagtctacgcaaattgacactgttttaaaaaaagtgagtcagttagcccaattcccggatgaacggtatacatctcaaaatgttacacacggtgccgttgtaaaaaaacggtatcgtgtaaatggtgcttatgaagaagctgtcttagggtatccgcatatcttgttagctgttcagacttatcaaaagtgggaaacaagtacgccgcaacaagcccaactccagatgttattgacgttaatgggatcagtcgcggatacttgcgtgttacaccgtagtgatcaacaaacgcttattaagatgcaacaactagccattcaagctggtcaaaatacactccccaatgctagttttacggcgctgatccaatactgccaagaacaccatatttcgccaggcggtagtgcggatttattagcagctactctgtttgtacttgcagttgacgcaaagattagtggctgttgatattagaaataaacgttgttaaaaaggattgcgttattcgtttaaaaacgaacgacgtaatcctttttagttagactgtcattttttctcagtaacttttgctgaaaaaatgggcgtagtttgatatactgtcttatagatataatcatagaaatagcggtccgcatatgggcctgtttcgagatagaaagtgtggctgaagtagtagtggctaatattaaaatcgtaacggattcatcaattcaattaacaccagaagaaattaaacaacatcatattacggtgattccgttgaccatcatgattgacaataccgtctatattgatggtgaaacaatcacacgtgatcaatttatgactgaaatggctagtgctagcgcgcttcctaagacgagtcaaccagccattggtaattttatcgaaacatacgaacaactagcggctgacggtagtcaaattctatcaattcatatgttacgtgcgattagcgggacggttgatacagcgcgtcaagctggcgaaatggctaaagctgacgtcactgttattgatagtgattttacagatcgtgcaatggccttccaagttttaaaagcagcggaagtgattgaagcgggtggttcattagaagatgccttagcagccattcaagcagttcatgataatacgaaactatacatgggtgtcacagacttaaccaaccttgttaaaggtggccgtttaagccatgcagccggtgtgatttcaagtttattaaatatcaaagtgatccttgaagtcgctgacagtgagctcaaggtgctccgtaaaggtcgcggtatgaagactattacgaagttcattgatgaaatggacgatgatctcagaaagttaaaaaatgttaaagcaatcggtatttcacacgccgatggtttggaactcagtgaaaaaatcaaggcgcaattacaagcagcctttccagcaatcgaaattttagtacgaaccactgatccagtcattgcaacccacgcgggcgccggtgcttttgcagtgatgtattatactgaaaactaagacgtttacgactaaggctggttgacattcatttgtcccagccttaactattatctaaagagatatgagggtgccagatatgaaaaaaatacgacaattgttgatcgacctagggatatttgccggggtattactcgtcgtctttatcgtttggcagttattgacaccacgtccaatgaaagtacgtagtcatcaagaaagtgttcagaaaacgaaagtcgttcaaccaaagaaagttaaaaaaacactgcatttagtagcagtcggtgattcgttgacccacggggttggtgatgagcaaaataaagaaggttatgtttcgcggattgccgctaaaattaaaactgaaacgggccatcctgtcgcgaccgaaaactatggtgtcaccggtgataccagcgtgcagatcgaaaaacgagtgcgtacgcaaccaacactgcaagcgaatttaaaaaaggcggacatcattacactgaccgtcggtggcaatgatttaatggcggtcttacaaaataactttttggatttagatcaaaaacagattacagccgggcaaaaggcctaccaaacgcatttgatgacgctgtttagacaaattcgccaacaaaatccaacggcaccaattttcgtgatgggggtctataatccattttacgtttacttcccagagattacggggatgtcaaaggccgtgacagcatggaataagacagtcaaagaagttgctaatgactttgagtcggcttattatatcaatagcgaccgtcttttaacgcatggtgacggccattatgtgaaacaaacgaaatcgctcgctaaaatggacagtagtaaactgcaaaaaacacttgcagaaaacgagcatctcaatccctatattagcgacgacgatcatttccaccctaatcaaaaagggtatcaactcatcaccaacgctttttggcagcagatgaatgcacaccaaaaagattggaccaagtaaggaagttagttaatgcaaaccagacaagatttaaaaaaggaacaagttagccctaaacgaacgattaattattggaaatatagttttattgttttattggcattagtgattggcacgctcggttttatcgcctataacgttagtgcaccgcaaactaagcaagttcagactgaaaaaatgatcaaagctgacagtacctttgatattcagatgcacaagaagcaaattaatagcgtggtcgcctattaccttgaaaactaccttgagaattcaaaggtgaagtacaactttaccctagatcaacaagcaattctttctggtcaatttaagtttttaggttttccggtcgaattcaacctctttttcaaaccatatgtgcttgaaaacggggatattcaactacgtgctaagcaattggctgtcggtcaattgaaagtaccgatgtcatttgtttttaattacatccaacgtcaatataaattccctaaatgggttgttttaaatgcgcataagagtcgcattaccttgcgcttgaatgaatttaagttagctaacgggatgcaggttaaggcccgccatattgatttgaagaacgataagattgatttatccgtatacgtgccactaaaaaataagaaataaggtgtgcaaaatgaagcagagtttctatcggtatctcatgacacaacgcgatccgaataactacgaaccagttgcgcaatttgccaacaatgctttcttcgatcaatcattccctaaacatgaaggggactatgaaccgttatcccaatatttggagttaaacggtagttatttaccgagcatgctaatttttgacgaggcctatcagctatatcaagaaagcgaacaggcatagtaaaatagtgattgaggcgatttaatgagacggaaactagcaatcgcaggtaattggtttttagcaattctcgtggccggactggttgcttttgtcatccggtccttctttttggtgccggcgacggttgctgggaattcaatgcaaccaacccttaaatcgggtgatcaactcttattgaaaaagtttgggcaggtccatcgctttgaaatcgttgtttttcgcttagccaatgggaccacttatgtgaagcgcgtgattggtctaccgggtgagcatatcgcttatcaggagggtcaattatacgttaatgaccggccagtcgtggaaccttttttgaagcaatcgcagcaaaagacggttttaacttccgattttgatttaaaaacattaacggatcatgaccgaattccggctaaccaatactttgttctcggggataatcgacgaattagcaaggatagtcgcacgtttggcacaatcgaacgtgaaacgattatcggccgcgcagtaggcgtttattggccgattgaagatatcacttattttaaataaacgagaaaggttacgactgcgggtcgtaacctttttaatttaagccatcaagttcgcgctgaggtatgatagaattaagaataatactatcggtaagagatgtattcatcttaaacagtaataaaggagttattatgacaatacaatggtacccaggtcacatggccaaagcacaaaaacaaattaaagaacggctcaaggcggttgatttaattttagaaattgtggacgcccgtgtaccggaatcttcaattaatccaatgattcaagaattaggtcaaaacaaacccattctattaattatgaataaggccgatatggctgatccacgacggacgcaacaatggattgaaacattcaagaaacgcggcattaccgcaattgcccttgatgcacagcataaagccaagttacacatgatcgaaaaagtagcacaagaaattttagctgaaaaattggctaaaaaacgtgctaaagggattcgcaacccggtcatccgggcgatgtgtgttggcgtgcctaacgttggcaaatcaacgattttaaatcgtttagttcaaaagaacatcgctgtaacgggtaatcgcccaggtgtgacgaagaaccaacaatggttgaaagccggacaaacacttgaattgctcgatacaccaggggttttatggcctaagtttgaagatccaacaatcggcagtaaattagcccttactggtgcaatttcagatgccatctatcatccagacgatgtcgttatttttgccttagaacattttaaagaatactatccaagtcaacttcagaaagtttataaggtgacagatgccgaacttgaagaaccagccgcagaattaatcatgattttaaccaaacggttaggcttcaaagaagattatgaccgtttctgcgtgaagttcattaatgatgcgcgccaaggtaaattaggacgcttcactttagacgttgtaccagtggaggcgtcataaaatgaccaaagcacaatcgattgctgaaattaagcaattattacaagcaccagtgaccgaagagcagttggccacttttgcggctgattcgcgggccggtgttcagaaattggtagttcaatatcataagcgagcggcaaaattagcggctcaaaaagcagcttttgaagaacggcgtcaaatggaaaaagcgctctggcctgattatccgttagtcgccggaattgatgaggtgggtcgcggaccactagccgggcccgttgtgacggccgctgtgattttgccccatgattttgatctttggcaggtcaatgattccaaacaactgtcatttaagctcaaacaagagttgtatcgagagattatggcccaggcagtcagtgttagtatcggaattgcgtcacctgaacggatcgataccgaaaacatttaccacgcaacagagttagcaatgggtgaagcagtcgctggtctggataaacaaccggactacttattagtggatgcaatgaccgtaccgactgatattccccaagaaaaattaatcaaaggcgatgcccgcagtattagtattgcctcagccagcattgtcgcaaaagtcattcgggatcaattgatgattaattacgatcaacaatatccaggttatgatttagccaacaatatggggtacgggacagctaagcatttagcggggcttgctgaattcggggttacaccaattcatcgccgcagtttttcccctgttcaaaacgctttatagaaaaataaaacagctcttttacggattattaattaacgtaaaggagctgtttttgtgttaactaaaaatcaattactcttaaaagtacatttagcggcgggttttgggcctattagtgaattacgcttggcggcgtggctggcaaccagtcataattgggcgttatcggcgttagaaattgcgcagattgcgcgcttgccggaacgttattggccgacttttcaagcaagttttcaaagtacaaccttacaacgccaatgcatcgaccatgaagttcgaacgacttatttaaccatcttagataaagattacccacaacgcttattggaaacctatttgccgcccgttttgttattttatcgtggtgatttaagattgttaaaacagccatgtctcgcggtagtcggggcgcgtcaagcgactcattattctaaacaatcactagaacagttattacaaggactaactgccactacgattattagtgggttagcacaaggagcggatgcgatggcccacgaagttgccttgcagcgtggtttggccccaattggggtgattggcacgggcattaattgcagttatccaccacaaaatgagcatttacaacagggagttgctgaaaaaggtttgttattatctgaatacgccctcgatacaccagcccggcgctatcaatttccagcccggaataaaatcatcgcggggttatgtcatagtttaattgtgacggaagcccggcacaagagtggtagcttgattaccgctaacttggcccttcaagctaatcgcaatgtctatgcaattccggggcgcattgatcaatcactgtcacaggggtgcaaccaattaatcgccgcgggagcgacaccattgttagataaaaacatattaatagaagaactacgttattttgattaagcgaaactgttttggttgacattcataatccctcctgttattattaaaacaacaagttacttataaagtaacaaataaaccactaaggggattttaaattatgaaatatgcaattacagctgtaacaggacgttttggccaagtagccgttcacgaattagcaaaattagtacctgcttcagatattattggtttggcacggaacgttgaaaaagcccaaaagatggtgccagcaggcgttaccgttcgccctggggattatacacaagaagcaacattagcagactcattacaaggtgttgatcgcctactattcatctcatcgcaaccaggcgcagaagtcccacgcgatcaacaacatatggccgttgtccgggctgctaaaaaagccggggttaactggattggttatacaagtttcccccacgctgaccaaacaacttctggtttagctgaagatcaccgtaaaacagaagcagccattatcgaatctggtattgcgcattctttcttacgtaataattggtatcttgaaaacgaactcgatacaattaaaggtgctatcgctggtcaaccattcgtttatggcgctggtgacagtcatgttggttggacactcgaacggctttatgctgaagcagccgctaaggtattagccatgactgattcaaaagacatttatgaattcgccggtgcacccgcaacttatgctgatttagccgaaagtgttgcacaattgactaatcaagaatttgcggtatcatcattaagtattgctgagtatcaaaaagggcttgaagcaagtggcttacctgctgaagtcgttggtgttgttacgatgattcaaagcttgattcgtgatggtgaattagatgaagtttcaagtgatttaccagatgtcttaggtcgaccattaccatcattaaccgcagcccttcaagaattgttaccagcagaatcaaagtagagaatccgtttgaaattgaggttaaacgatgaaatattcccacaaactaagtgatgccattcatatcttagcttatgtcgaaatttatcaagatggggacttatcgagccagtcaattgctggcagtatcgaatccaacgcgagcttagtgcgtcggttgatgtcccttttggtgaaagctgacttattggagagtcgtccagggacgattgcgcctaaattagcacggccagcagagcagattagtgttttagatgtctatcaggcgcttgatactgatcagcaattgttgcacatcgatgaaaagacaaatccgcagtgtttggtgggtgctaatattcaatcggcattgaatgacgcttatgatcaggttcaaaaagcggctgaagatcagatggcgcaaattaagttggccggcattattgcagatatcttagctaatagtgcgcaagtcaacgcttaaaaaaacaaggtaaggataaaaattattttttatcacaccttgtttttttgtggtttagtgcggtaggattggttatgaatttgttataatccactgtttttctgataagtttcctttgaatactgggaaacctatgctatgctttaatctgataatcactagcgcccgtttggatttgacaaacggcgcccacgtcacatattattatgtacgattttgaacaaagcgttctgttgaaaggggtttgtccatggcaggcaaaaatttagtcattgtagaatcacctgcaaaggccaaaacaattgagaaatatcttggacgcaactataaagtcgttgcaagtaagggtcatatccgcgatttacccaagagtcaaatgggtgtggatttcgaaaataattatgaacctaaatatatttcaattcgcggtaaaggcgaaacaattaaagaattaaagaaacacgctaaaaaagcggatcatatctatttagcagccgatcccgatcgtgaaggggaagcaattgcatggcatgtttcacatattttaaaattagatccaaccgataaaaaccgggtggtcttcaatgaaattaccaaagacactgttaagagtgcctttaaaaatccacgtagtatcgatatgaaattagtcgatgctcaacaagcacgacgggtattagaccgaatcgtgggttattcaattagcccactcctctggcaaaaagttaaaaaaggcttgagtgccggtcgggtgcaatcagttgcgttaaaactcgtgattgatcgcgaacaagaaatcaaagcttttaaacctgaagaatattggtcattagatgccgaattcaagaaggggcgcagcaagtttaaagctagtttctacggtttaaacggtaagaaaacagccttaggcaataacgatgcggttcaagatgtcttaaagcaaattgataagacgcaaccttttacaattgaagatgtcaaaaagcgtgaacgcaagcgttttgcggcggcaccttttaccactagttcactgcaacaagaagccaaccggaagttaaacttcagaacccgcaaaacgatgatgcaagcccaacagttatatgaagggattaatctcgggggtaaagaaggcacggttgggttgattacgtatatgcgtactgattcaacccggatttcaacgggtgccaaacacgaagcgtcacaattcattcacgataactatggtgaagaatacgccgctgttaaagcccataagacgaaaaatccagaaggcgcacaagatgcccatgaagcaatccgaccaacttctgtgatgcggacacctaagagcttaaaagatgttttaacaaacgatcaatataagatttataacttgatttggtcacggtttgttgccagtcaaatgacacccgctgtctttgatacagtggcggttaagattaaccaaaacaacgtcttatttaaggctaatggctcacaaatgcgcttcccaggttttactaagctatacgtttcatcccgcgataccgaagattcagcgaaggataacttattacctgaattagcggttggcgatgaagtgaaattagctaaaaccgatccagcgcaacatttcacgcaaccaccggcacgttattctgaagccaacttggttaaagcgctcgaagaaaacggcgttggtcgtccctcaacctattcaccaacgattgaaacgattcaacgacgctattacgtgaaattgaatgctaaacgatttgaaccaacggaattaggtgaaatcgtcaataatttaatcgtcgaattcttcccagatattgtcagtatcgactttactgccgatcttgaacatcgtttggatgaagttgaaatgggccaagaaaattggatcaagattattgataatttctaccaaccttttgaaaaagaagttgaaaaagctagcgttcaaatcgaaaaaattcagattaaagatgaaccggctgggttcgattgtgatatttgtggggcgccaatggtggtcaaaatgggccgttatggtaagttcttcgcttgcagtcgcttcccagattgtcgcaataccaaggcaatcgtcaaagaaatcggtgtgacatgtcctaagtgtggcaaggggcaagttattgaacgtaaatctaagaaaaaccggttattctacggctgtgatcgttatccagactgtgattttgtcacatgggataaaccagtcggcagaaactgtcctaagtgtgaacattacttagttgaaaagaaaattaaaggcggcaaacaagtcatctgtcctaatggtgattatgaagaagccgttcaaaaataagagaaaatttgaggtaattagatgacgacaaaaccttttgtaaatgtgattggtgccggcttagctggttccgaagcggcttggcaaatcgccaaacgcggtgttgatgttcatttatacgaaatgcggccggttaaaatgacgcccgctcatcacacggaacaatttgcggaattagtttgtaccaattcactacgggcaaatcaagtcacgaatgcggctggtttgattaaagaagagatgcgccgtttagattcaattattatcgctgcagcggacgaaaatgccgttcccgctggtggtgcgttagctgttgatcggacaccattttcacaaacggtcaccgacaaacttgctaatcatgaacgggtaaccgtgcatcacgaagaattgaccgctttcccagaaggccctacagtagttgctactggtccattaacgtcacctggcttagcagaagaaatcagtgcgttaaacggtagtgaaggtttgtatttctacgatgccgctgcaccaatcctggataaaaacagtatcgattttgataaagtttaccttaagtcacggtatgacaagggcgaagcagcttacttgaattgcccaatgactgaagcggaattcgaagccttttataaggccttgatttcagcagaagttgctgaaatgcacgactttgaagatgaaaaattctttgacggttgtatgccaattgaagtcatggcaaaacgcggtatcaaaacaatgttattcggacctttaaaaccagttggacttgaaaatcccaagaccggtgaacaaccttatgctgttgttcaattacgtcaggataatgccgctgcaagtctttataacatcgttggtttccaaactcatttgaagtggggcgaacaaaaacgcgttttccggatgattccaggtttagaaaatgctgaatttgttcgttacggtgttatgcatcgtaataccttcatgaaatcaccagacgtgctattaccaacttaccaatcaaaacaacgttctgatttattcttcgccggtcaaatgacaggtgtcgaagggtatgttgaaagtgctgcttctggcttagtggctgggattaatgctgctcgtttagcgttagacacagaaccagttactttcccagcaacaacggcaatgggttcaatggcacattacattacgcataccagtgccaaacatttccaaccaatgaatgcgaacttcggaattttcgaacctttaaaacaacgaattcgcgataaaaaagaacggaatcaagcacttgcagaccgtgcgttagcaagtattgacacatttaaagaaacactctaggtaaacaccttttaaatcccgctaagcttgtggtaaagtattattaaccaagcttggagggatttttttggcgcttgaacaagattggattaatttgtttttacaatacttaattgttgatcgacactattcaccagaaacgcaaaaggcctatcaagccgatattaaagcgtttgtcgattttttggccgctaatgggggcctgacctcctttaaacaggtcggtacccttgaagtacaaacttatttgaatgaaatggatcaaaaaaaatatagtggcgaaacgattgcacgccggatttcaagtttgcggtcgttttatcgctacttggtgcgcaacgaatttttacagactgatccgtttgaaacggtccaactcaagaaacaacgccacaagttaccccgctttttctatgaaaaagagatggatgcgttatttgccgcgattgtggggcaagaaccgctaacccaacgtaatcgcgccattcttgagttattatatgcaacagggatgcgggttagcgagtgtgcccaactcacgattggccagattgattttggtttacgggttattttggtacatggtaaagggaataaggatcgttacgtgccttttggcaatcacgcgactaaggctttgcaggattatttaaacgatggccgggtgcaattgatggccaaacgccagcaagaacacgatgtggttttcgtcaaccatttaggaaatccgattaccagtcggggaattgaatacgcattggatcaagtggttaaaaagaccagtttaaccagtggcattcatccccacatgattcgccatacctttgcgacccacttgctagaccacggggcggatttacgaacggttcaggagttattaggtcacagtagcttatcgacgacccaaatttacacccatgtgacgacggcccatttacaaaaggattaccgtcagttcttcccacgggctaaaaactaggactaaagaacgatttttttaataaaaaagagcgatagaattagcacacagtcttaaagactgctaaaatgtgattaacgctatttaaaggagcaaatcaaatgacaacaatttgtgcagtaaaacataatggtcgaacagcaattgctggcgacggacaagtaacaatgggcgaaaaattcgtcacaaaagattcagcgaaaaaaattcgccggatttatggcaataaagtcgcaattggttttgccggtggcgttgcagatgcgtttacgttacaagaatggtttgaacaaaaattagaaaaatactcaggtgatttacaacacgccgctgttgccttggcacaggactggcgtaaagatccaacgcttcaaaaattagaagcaatgttgattgccattaacgaaacagatattcttttgatctcaggtaacggtgaagtcattacccctgatacacttgctgaatcaggtgatcaagtgattgccgttggttcaggtggtaattttgcccaagcggctgcaacagccttgattttagaaggtaagcccgaattaacagcagaacaaatcgttgaaactggcgtgaatatcgctggtggcattgatgtttatacgaaccacaacgtgattgtggaatcattttaggaggtggcccaaatggatttgatgaataagacacctaaatcaattgtcgctgaattagacaagtttgtaattggccaagataaagctaaaaaggccgtagcggttgcgttatataaccgttatcgtcggatgcaattaagcactaagatgcaacaagaaattacacctaaaaacttattgatgatcggaccaaccggggtcggtaagacagaaatcgcacgtcgcttagcgaaagtcgttgatgcccctttaatcaaggttgaagcaactaaatttacagaagttggttatgttggtcgcgacgtcgaatcaatggtcagagacttagcggatgttgctgttcacatggaagaatcagaacaattcaagaatgtgcgcggtaaagcggcccgtcaagcggacaaacgcttagtaaaattattagtccctggtatcaagaaggaacaacgtaagaataacaatagcatgaacgacttaatgtcaatgttcactgcccttcaaaatggtgaaacaccagctggcttaaaccaagctgaaactgaagaagtgaccgatgaagtacgtgatcaacgcctatctgttaaggaacaacttgataagggactcttggatgatcgcgaaatcgaaattcaagttgacgaacccaaaaaggccgcaccaatgaatgatatgatgggccaaatgggaattgatttgaacgatacattaggatcaatcatgcctaaaaagaagatggtcagaaccgttaccgttaaagaagcacgtgaaatcttcattcaagaagaatctgataagttggttaatcatgccgatatttatcatgatgcccttcaaagagctgaaaataccgggattatctttatcgatgaaattgataagattgctgccggtggcaaaaaacaatctggtgaagtctcacgtgaaggggttcaacgcgatattttaccaatcgttgaaggctcacaagttaatacgaaatacgggatgcttaagacggaccatatcctcttcatcggttctggtgcctttgcggaatctaaaccaagcgatttaattgctgaattacaaggccgtttcccaattcgagttgaattagaagacttaactgaagctgactttgttcggatcttaacggaaccgaataatgcgcttgttaagcaatatatggctttaatcggggcagatggcgttcacgtcacctttacgatggaagccattggcagaattgctgcgattgccttccaagtgaaccacgatactgaaaatattggtgcgcggcgcttggcaaccatcttggagaaattgttagaagacattctctttgaaggaccagatatgcagatgggtgatatcaccatcactgaacaatatgttaatgataaaattggtaagattgtagccgataaagatttaacccgctttattctataaatttctaaaggtggttttaaaaatgatccaaattgcaaatgaatttttaacagtaacacttagtccacaaggtgcggaattacagagcgttaaaggtgccgtttcagggttagaatatctctggcaagcggatcccaaagtttggggtcgtcacgcacccgttttattcccgtttgttgggcgttctaagaatgatcaatatacgtatcaaggtaaaacttacccaatgggccaacacggctttgcccgtgaccgtcaatttgaagtagaaagccaaactgatacggctgtgacattcttattgaaatcagatgaagaaagtttaaaaatttatccatttgaatttgaactacgcgtttcttaccaagtaaacgacacacacctaaaagtgggctatgatgttaaaaatacagcgcaatctggcccaatgtacttctctgttggggggcatcccggttttaaagtgccattaacggacgatacccaatttgaagactatttcttagactaccgaccacaaaaatcacgggttaagattccattgcaaggcgcattcatcaatttgaatgaacgcacattggcaccaacggatgtggcaactgatatcaatcacccacttttcaaagaagatgctttaatttacgaattaaagggtcaagaaaataaatttagcattcgttctgaaaaaacagaccatgcgatcagcttgaaagtatcaggggccccatttatcggtgtttggtcaccttatccaacggagggcgaattggtttgccttgaaccttggtggggaattgctgatgatgtcgatgcttctggtgaactttcagaaaaatttggtgtcaatcaattagcacctaatgaagaatttaatgcgagctatgaaattacagttaaatagttaatataaggcgtttctcgtagagaagcgcttttttgctcggtattacacgaagcaaacctgctagtttttaaatagattgcatgctaagataataattattaaacaataagtgagggaaatcatgactgataaaaaagagtactacggcgcagatgcaattatcgatagcttagtaaatcatgaagtagaatatgtttttggtattcctggtgccaagattgaccgggtgtttgaacgactagaacatcccgttaaccctaaaacaccccaattaattttagcgcgtcatgaacaaaatgcggcgtttatggcagctggtatcggccgaattaccggtaaaccgggggtcgtaatggcgacatctggtcctggtgctagtaacctagcgacaggtgttgtgactgccactgctgaaggtgatcctgtcttagcaattgccgggcaagtgaaacgggctgatttgctccgtttaacccatcaaagtatgcgtaatgcagcgctctttgcaccaattactaagtttagtgcagaagtgcaagaacctgaaaacttatcagaagtgattgccaatgcttaccaagaagctgaatcagctaaacaaggggccagttttgttagtgtccctcaagatgtgacggacgctaaggtccaatctaaagtaattaagcctctaatcgcacctaaattagggcctgctagtccggttgaaacaaccttactagcccaacggattaaagaagcgaaactccccgtgttattagttgggatgcgagcatcttcacccgaagtaacagctgctattcggaatctaattgccgaaacacatattccggtcgttgaaactttccaagccgctggggttgtctcacgtgaattagaaactgatttttacggtcgtgtaggcttattccgtaatcaaccgggcgatcgaatcttaaaacgtagtgatctggtaattgcgattggctacgatccaattgaatacgaaccacgtaactggaatgccgaaagtgatgcgcacatcatggtcatcgatgatatgcgtgccgaaattgatcataatttccaacccgaaaaggaattagttggggatatcgcacaaacgctcgatttcttattaccatacatgaagggctatcaattagccgatgatgttcgtgactacctcaaggaactccacgcagaattacaccaacgggatacagcacctgaaatgtcagacgataagacactcaatcatccattgaacattgtgtctgagttacaagaacgcgtgactgatgaaatgacagtcacagttgatgtcgggagtcattatatctggatggcgcgtcactttagaagttacgaaccccgtcatttactctttagtaacgggatgcaaacattaggggtcgcgttaccatgggccattagtgctgctttagtccgtcctaatacgcaaattgtctcagtttccggtgatggcggcttcttattctcaagtcaggatttagaaacagcggttcgcttgaatttaaacatcgtgcatatcatctggaatgatggttactatgacatggttaagttccaagaagaaatgaaatatggcgaatcagcagccgttcaatttggccccgttgatttcgttaaatatgctgaaagtttcggcgctactggtttacgtgttgaaaaagcagccgatttaggcaaggtcttagaccaagcttttgcaactgatggcccagttattgtcgatattccagtcgattacagtgataataagctacttggtcaagccttattaccagatcaacttgtatagcatttttgattggtgtgaaggaggaagtacaaaatgacatttgattatcaacgtgtctatcaacacggtacattggcactattggtccccggcctatttaccgggactttgtcggtcgccgatttattaacccatggtgattttggtatcggcacggcgcatggcttagcaggcgaaatgattatcttagatggtcaagcctaccaagtgaccggtgaaggccaagttaataaacttgcgcctactgacatggtgccttttgcgacagttcatttccaagcccctgaactgacaagccaagcattagggacagtgactaaggcggatcttgaagcccagatcttagcgcaacggccattgaagaatctcttctttgcggttaaggtgactggtcgctttaaaaagatgcatacgcgtgccgttgaggcgcaacaagaaccctatcctaatttgacggatgcaacgcgcgtgcagcccgagtttgagcaagatggcgtgaacggcacgctagttggttattacgcaccagcgctctaccaaggggccgcagttgctggttatcacgtgcatttcttaaacacggcgcacgattttgggggccatgtcttagattatgtgattgaagacgcccaattaaccatacaaccgtttgagacattcgagcaacatttcccaagtcaagatactgcctttttgaacagtgattttgatttgaaggcgattaacgccgatattgaagaagcagaacattaaaaaaagcccgttcagacgttttcagtaacgtttgaacgggctttttgctattattatcgctttaagtggttgatccgcattgctttaagaaaagtggctacgattaataatcgtgttgatggttaatctttagggcaaccctatcagccgttatgtggcggctgatagggaaaaacgttaaactttattgcgcgtgatgattaatggggccgtatttgtgaccaacgtcaattggattggcaatggccgtgtggacgaatttcttagccgttttgatggcttcttcgattgaatggcccttagcaatctcggcacagatacatgaagagagtgaatcccccgtaccgttaatatgggtcgtttcgatgtagggttctgataaccagaattcttgaccatcggctagtcgaacgtaatcagtaacgattgattgaccggcagcgtggtggcctttgatcatcacgttcttagcacccattgccagtagcttttcagctgctgcttggaaatcagctggttcatttaaggtaataccggttaatttttgagcttcatagaaattcggcgttaaaacggtcgccattggaatcaattcggtttttagcgtctggtaggcttcatcagcaagcaataatgcgccgtgtttggtaataatgacggggtccaaaaccaaggggccaaaatcatgttgcttgagttgattggcgactgtcataatcgtctcgctatcggtgagcatccctgtcttgcaagcgcggaccttaaaatctgcggcgattgcttcaaattcggcgttgataaactcgggggttagcgcttggctcgcatgaatcccaaatgagttaccagcgacacatgcggtcaggacgctcatgccataaacaccgcgtgcgaagaaggtatttaaatcggcttgggcaccggcactaccatcagagtcggaaccggcgattgtcataacttggggaaagctgtttaacattgtaaccatctcttttcttgagtttgcggtcaacttaattggcgatattcaattaagaatccctattgctagtataagcgttgtttacgctacttatcaatcgccttttaccctaaaaataaaaaagtcgcgtatactagaaataatgacagatttatgggagggtatcatgcttcagttagagacaaaagaccttaattatagcgttgatgggcaatcaatactgagcgatattaacatcgcgattgaacaagggtcttacaatacgattgtggggccatctgggagtggtaagagtacgttgctacggctattagcggatctattgacaccaacgagtggggagatcttgttggcaggccagtcgattaccgattttaaaccgacacaatatcggcaacgcgtgtcttattgttttcaacagccgacgttatttggggagacagttggtgacaatctcacttttccgtttgaaattcgtgaattaccagttgacgagacgctagttaagacgcaattagcccgagtgggattagccgatatgtcgttgactaagaagattacgacgctctcaggcggtgaaaaacaacggattgctttaatccgcaacttaatgttcaaaccggagatcctgttactggatgaaattaccaccggcctagatgaacagactaaggcacaagttaatgggttgattacgcaattgaatcaagaagaaaagattaccgttttatcgattacccatgatacacaagaacaacaacggaaagggcgtcagcttcaaattgtggctggtcgtttggtacatacagatgaatctagccgttaacgggttatcactaacttttgctatttcgttagtctttgtcgctttaatcattagttttcacgaaaaaatcggtctcgaaaaagatatgctaatcagtgtcgggcgggcgattgtccaattgattatcgtgggttatttattgaaatttatttttcagattaatcatatctggataacgctagcgatgatgctgatcattatctttaacgcagcggctaacgcacgtaaacgcgctagtacgttacgacacgcgtttggtatttcattaatcgcgattttaacaagtaccggtgttacgctcggcctactagtcttatccggcgcaattaagtttgtgccctcacagattatcccgattacggggatgatcgcctctaactcgatggtcgccatcggcctaagctatcggagtatgttgacgcagtttaaggatcaacgtcaagccgtattggaacgcttggcactcggtgctagcttgaaacaagcctcaattgcaattgtgagagaaagtattaagacggggatgtcaccgactatcgattcagccaagacggtcggtctggtcagtcttccagggatgatgtcggggttaatctttgccggtgttgatccggttaaagccatcatgtaccaaatattagtaacattcatgctattatcggcgacgagtcttggttcagtcattgcctgctacttagcctatcattcattttataatgaccgagaacaattaatcgatctttaaatgatcgaacaaaaaaacgcctttattggcgttttttttgtttatagcggtaatataacccgaatgggactaggttttccgtaccatttttaatgcgaccgatattctcgcgatggcggtaggttaaaaagattaggactaacgtcgcaatcgtaccgagtaaccagtcgtgtgtgtaaaatgacaagatggcaattagtaaggggccgatgatactggccatgctgaccatacttgtgattaaaatgacactaatgaaaatggtactagcaatcacgaagaaaagcggattgtaggccagtaagatcccagcgctagttgcgacggctttgccccctgtaaagcgtaaaaagatagagtaggcatggccaacaaccgcggctaaaccaacgactaagaccaatgaatgattagggatgtgaaaaattatcggtagactggctgctaaagtaccttttaaaatatcgaggaacaaaacggccgtcccagcgattgggcctaatacccggtaagaattggttgttccaatattatgactgccagcatcacggggatctttatgacaaaagacccgaccgataatgacgcctgagggaaacgagccaatcaggtaggccaagataaaaataagacttaatttcattgtcagaactcctattcacaacatttgattaatctattctagcattttgacaagggaaaaggaatattgtatgttagaatagataaatacgaacatacatttggataagtggttaaattaaatttagggattgtaaaatcgttcaaatttgttgataatataacttatctgttcatttttagacaaaggagtcattgttgaatgccaaatcaaaaacaagattataatgataattcgattcaagtcttagagggcttggaagcagttcgaaaacggcctggcatgtatattggctcaaccgatgggcgtgggttacatcatttagtatacgaaattgtcgacaatgcagtcgatgaagcactagcaggttttggtgcagaaattaacgtcacaatcggtgcggacaatagtattagtgttcgtgatcatggacggggaatgccaactgggatgcatcaatcaggcattccaacgattgaagtcatcttaacggtcctccatgccggtggtaagtttactcagaatagttacaaaacatctgggggattacatggtgttggggccagtgtcgttaatgcgttatctgaatggttaaccgtccgggttgttcgagacggcgttgcctatgaagaacgctttgaaaacggcggccatccagtcggcactttaaaaaaggtcggtaaagctaacgaacctaacgggacactgattacttttaaaccggatgcatcaattttccaagtcacaacgtataattacaatacgttagcagaacgattacgggaatcagcctttttattaaaagacgttaagattacgttaacagacttgcgtgctgatcctgctaaggaagatgtctttcattatccagaggggattcaatcattcgttgattatctaaacgaggataaggacacgattggcaataaactctattttgaaggcaccaaagaagacatcgaagttgaattcgctggtcaatacaatgacggctattccgaaaacatcatgtcatttgttaataacgtgcgaactggtgatggtggtacgcatgaagcagggatgaaagccgggttaactaaggcgtttaacgattatgcgcgcaaggttaacttgctaaaagaacgggataagaacatggaaggctcagatgttcgtgaaggactcagcgccgtcttatctgtacggatcccagaagaactactacaatttgaaggtcagaccaaaggtaagttaggctcaccacaggctagaaccgcggtcgacaacctcgtttacgagcaaatgagcttctttttactagaaaatggggaatttgcccaagctttggttagaaagtcactcaaggcccgtgaagcccgtgaggcagcccgtaaagcgcgtgaacaaagccgaaacggtaagaaaaagaaaaaatcagacggcttactctctggtaagttgacacctgcgcaatctaagaacgcggccaaaaatgaattgtatttggtcgaaggggattccgctggtggttcagctaaacaaggccgtgatcggaagttccaagcaatcttgccactacgtgggaaagtattgaatacccaaaaggcaaaattacaagaaattctaaaaaacgaagaaattaatacgatgatctatacaatcggggccggtgtcggcgctgaattcaaaattgaagatagcaattacgataagattattatcatgaccgatgcggataccgatggcgctcatattcaaatcttactcttaaccttcttctatcgttacatgcgaccattaatcgaagccggtaaagtgtatatcgccttaccacctttatacaagcttcaaaaaggcgccggtgctaaaacgaagattgcctatgcttggacggacgatgaattaaaagttgtcgctaaggatatgggtaagggttatagccaacaacggtttaaagggttgggtgaaatgaatgccgatcaactctgggatacaacgatggatccatcaagtcggaccttaattcgtgttcggattgacgatgctgccttagcagaacgccgggtgacaaccttgatgggtgataaagttgaaccgcggcggaagtggattgaagaaaatgtgaaattcacgctcgctgaagaaggcagcattttagagacaacggggcaaacaacaacgccagtctccgacgataacgcagtagaataattagacgattagaaaagtgagtgattaatttggctgatgaagcacaaaaaattcaagagttaacccttgaagaagtcatgggcgaccgctttggtcggtattccaaatacatcattcaagaacgggcattaccggacattcgggatggtttaaaacccgttcaacggcgaattttgtacgcaatggcaattgatggcaatacttatgacaaaggattccgtaaatcagcgaagtctgtcgggaacgtcatgggtaattttcatccgcatggtgatagctcgatttatgaagcaatggtccgcctaagccaagactggaaattacgggaaccattaattgaaatgcatgggaataacggttcgatggatggtgatccaccagctgctatgcgttatacagaagcccgactcagcaaaattgccagtgagatgttaaaagacatcgataaaaagacggttgattttgtcttgaactttgatgatacggctgaagaaccaactgttttaccagcccgcttccccaacctcttggtcaacggggcaactggtatttcggccggctatgcgactgagattccaccacacaacttaggtgaagtcacagatgggttggtttatttaattgatcatccagacgcaacgctagaaaagatgatgacctttgttaaaggtcctgatttcccgactggtgggattctacaaggtcttgacgggattaagaaggcttacgaaacgggccgtggtcgcgttgttgtgcgggctaaaactagcattcaacaattacgcggtaatcgggaacaaatcgtcatcagcgagattccatatgaagtcaataaggcccaaatggtcaaaaagattgatgaattacgggtcttgaagaaggttgacggtatttctgaagtccgtgatgaaagtgatcggatgggcttgtcagtggtcatcgaattgaaaaaacaagctgatagccaagggattttaaactacctcttcaagaatactgatttacaaattacgtataattttaatatggtggctatctctgatatgcaacctaaacaagttggcttgcttgaaattttgcacgcgtacttgaaacatcaagaagaagtcgttacgcggcggacacaatacagcttacaaaaagcacaagatcgtttgcatattgttgctggtcttgttaaagccttatcgattcttgatcaagtaatcagtacgattcgggcaagtaagaataaaaaagacgctaagacgaatttggtggcacagtatgattttactgaagcacaagccgaagcaattgtttccttgcaattgtatcgtttaacgaataccgatgtgactgccttggaagccgaagctgctgaattaaaaacagcggttgaaggctaccaagcgatcttgggaaatcctaaagaactcgcacgggtcattaagtctgaattaaaatcggtggttaaagcttaccggaacgatcggaagacagaaattgaagccgaaattgaaacccttgagattgatacgagtgtgactgtgattgatgaaactgtcatggttgcggttagtcatgatggctatcttaaacggagtagtctccgttcttatcaagcctcagaaggagctgacggtggtctgaaagaaggcgattttgccatcttacaaaagccaatgcaaacgctcgatcaattgatgttatttaccaactctggtcatctgattcaacgaccagtgcatgaaattgccgatttgaagtggaaagaaatgggcgaacatatttcgcaatcaattggcttagcagctgatgaagcgattattgcggcctttagctttacaccaaacgagcaaaatggttattttgtcattgggacgacagatggttatattaagcaaacagctttccaagacttattgccaagtcggacttatcgttcaaaagcccaagactttatcaaactgcatgctggtgcgaacgtgacgaatgtttattgggtctctgaaacagatgcccaacaacaggccgtctttagcgctagttataacggttacgggctcagttttgccttgaacgaagtgtcagtctctggtgccaaagccggcggtgtgaaactgatggatcttaaagatggcgatcacgtcgctaactttacgctctttgatccaaccgaaaaacacgctgctgtggcaattatcacgcaacgtggggcctttaagcgcatgttcttaagcgaaattggcttaacaagccgtgctcggcgtggggtcttaatcttacgtgaattaaaacgtgatccgcatcgggtggcagctatgattagtgtcgcacctaagatcacattattagtgaaaaccgaacaggcagtattaacaattgaaccacaagcgcatgcaacaggtgaccgttattcaaatgggagcttcgtcatggatgttgaagaagttggtcaaccagtatttgttttagcacaatccagtgaaccaatttcaaaccataaagattaatcaaaaggacactaattaacctaattagtgtccttttctgttatataaaagaagcgaaaaatcgaaatctgtaccataacacttaaaaggttttgcacaatctaaattaagtggacaacttgttctaaaatgaagtgctaacacttacatagcagtgttttaagacgtgtgacagttggtaaatgtttttaaaaagaaagggtttgcaaaaaccttgtgacgtgttatactaaatgtgtaaaaactgtatgactgaattttaaataaatggaggcaatccacatggtaaaaactgaaaaaatcaatttagccgattattgggacggttttaataagggtgattggcaagatgaaattgatattcgcgatttcatccaacaaaacttcacagcctatgatggtgatgaaagtttcttagctggtcctactgaagcgacaaccactttaaacgaccaattaatggcacttaagaaaaaagaacgtgaagcaggcggtgttttagatgctgataacgacaatcctgcaactgtcacatcacacggccctggttatttaaataaggatcttgaaaaaatcgttggtttacaaactgacgcaccactcaaacgggcattcatgccatttggtgggattcggatggctgaagatgccttagaagcttatggctttaagacagatccagaacaacacaaaatctttagcgaatatcgtaaaactcataaccaaggggttttcgatgcttatacaccagatatgcgtaaagcacgtcactacaagattattacaggtcttcctgatgcttatgcacgtggccggattatccctgatttacctcggattgctgtctatgggattgaccgcttagcagaagaaaaagtacgtgactttaacggtgttggcgacggtgaaatgacagattcagttattcaacttcgcgaagaaattaatgaacaatatcgtgccttacaagacatgaagaaaatggctgctagctatggttttgatatttcaagacccgctaagaacgcacaagaagccgttcaatggatctacttcggttacttagcagctatcaagactcaaaacggggctgcgatgtcagttggccggattgatacaacaatggatatctttatccaacgtgatttagatcgcggcttgatcacagaagctgaagcacaagaaatggttgatcattttgtcatgaaattacggatggtgcgtttcattcggacagaagactacaactcattgttctcaggtgatccaatctgggcaacattatcaatgtgtgggattggtatggatggtcgtcaccatgttactaagactgccttccgtgtcttgaagacattggaaaacatgggtgctgcaccagaacctaatatcacattactttggtcagatcgcttaccagaaggtttcaagcgttatgcaactgaagtgtcaatcaagagttcaacaattcaatatgaaaatgatgacttgatgcgcaacgaatggggtagcgactattatgggattgcttgttgtgtttctgcacaaccaatcgcagatggcgttcaatactttggtgctcgcgctaacttggctaagacaatcctttacgcaattaacggtgggattgatgaattaggtaaagcacaagttgggccagcttaccaaccaatcacaagtgaaatcatcgattacaaagaattcatgggtaaatacgataagatgttagattggttagcagacgtttacgttaatgctttaaacacaatccactacatgcatgacaagtattactatgaatcagcacaattagcattgaagaatagtcgcttagaccggacatttgctactggtatctctggtttatcacatgcggttgattcaatttcagctattaaatatggtcaagttaaaattattcgtgacgaagacggtatggcagtcgatttcgaagcacaaaatcctgactacccacgttatggtaataatgatgatcgtgctgatgatatcgctaaatggttagttaagactttctacaacaagatgaacacacatcacttatatcgtggctcaaaactatcaacatctgttttaacaatcacatcaaacgttgtttatggtaagaatacagggacaacacctaatggccgtcaagccggcgaaccattctcacctggtgctaacccagcatacggtgctgaaaagaacggtgctttagcatcattactttcaacagctaagattccttatcgttatgcaactgacgggatttcaaatacatttggtgtaacacctaatactttaggtcatgatgacaatgcacgtaaagatgccttagttaacatggtcgacggttacatggttaaccacggtatgcatttgaacatcaacgtcttcaacaaacaaacattaatggatgcacaacaacatcctgaagaatacccaacattaacagttcgtgtttctggttactgtgtctacttcgcagatttaactaaggaacaacaagatgatgttatttcaagaacattcttcgatgaaatgtagtcattcataagaataaacgaggcagcggatagctaaccctatccgctttcttgtaaagctgctaattttgatttagcagttttgctaggaagagtgtcttttataagaggtggaagaaatggcaattaaatttacaacccgtttatcaacggaaaccgcagaaacagtcgtaccagaagaaaccacagaaacaccaattggctatgtccattcaatcgaatcttttggatccgtagatggccctggtattcgttttgtggcctttttacaagggtgtcgcatgcggtgcgaattctgtcataatcccgatacttggaatattggtagtggggaaccatatactgctgacgaattaattgcaaaagcattaccttacaaagctttctggggtaaggaaggtggcatcacttgtagcggtggtgaatcactgattcaaattgatttcttaattgatttatttaaaaaatgcaaagcacagggcattaatacgtgtcttgatacgtgtgggcaaccgttcacgtataaggaaccatttttcagtaagtttaaagaattgatgaaatatacggatctatcgatggttgatattaaacatatcgatccagaaggtcataagaagttaactggtttttcaaatgaacatattttagaaatgattgaatatatgtctaatcacggacaccatatgtggattcgtcacgtcttaattcctgaacggactgattatgattgttacttagaacgacttggcgattacattaagacattgaataatgttgaccgggttgaggtgttgccatatcatacaatggggattgttaaatatgaaaaaatggggattaagtacccattaaggggtatcgagccaccaactcatgatcgggttgttaatgcagaacggcttttgcatacagctgattattcaaaataaattgtataaagcgttagcattagaaatttttaagtgaataataagaaagagcgccgaaaaaggttgctctttttttatttttttattattataatgataagggataacccaaagaaatgaggattgagcatgaagacgagacaagagaatatattttcttctaaaacgttaacttattttttgcaattagcggaaacgatgaactatacgcaggccgctcagctattagggattacacaacctgcattaacgcaacaaattaagaaattggaacgcacagttggggcaccacttttttattctgtcggtaagaaattacacatttctgatgccggtcggacaatgttagatgccactcatcaaatttacgatttattaaatacggcaacggatgaaatccaaagtgcaactagcgctagccgtggtaaaattaatattgggattctagcatcgatggaactcagtgttattcaaagtttcttaatcaagtattaccaacaattccccaatatcgaagtcagtgttcatttattgacacgtaaggaaatttgggaccgtctcgaaaataataaaattgatcttgcaatcatgtatttgccagatgacagtatcaaaaattggaagccttaccgttccaagaagattgcggatgaaagccttgttttcttgagcaataatccattgttgaagaaacgtaagaagattcattttgaggatacattaactgaaaaatgggtaacataccccgatgaatactatctcaaccaattcatcagtgaagcttataagaatcaaatggtagatcggccagtcagtgcagcccaatttacatcaccatttgaaattttacggtttgctgaagcaactgggttaagtactgcattgcctaagagtttttacgatgcccataatgttggtattgaatcgaacgcggtgcaatttgatccagcaattcaatttgaattggcctttgtattccgtaaagaaaaggaagatattcctcggattgacagtttcttccgagaatttaacctttatctagaagaaaaagactatttaacgcgaattaaggaacaaaatcgtaaaattatctaatttctctggtataatcgataatgtaattttgaaaagaagggtctgtataaatatgagtaaagaattagttttcggtcaccaaaacccagatacagacgcaattgttgcggcaatggcgtttgcttatctacaacaacaacttggcaaggatgtcgaagctgttgctttaggcgaaccaaatgaagaaacaagttatgcattacgtcactttgctgcaagtacaccacgtgtgattaaagaagctggtagtgaagtgcaaagtgttatgctagttgaccacaacgaagcacaacaaagtgttgctgatatcaaagatttaacagtgactgatgttgttgatcatcatcggattgctaactttgaaacagtgagcccattattctaccgtgctgaaccagttggctgtaccagcacaattcttttatcaatgttcaacgaaaataaaatcgaaattcctgcccaattagctggtttaatgatgagtgccatcatttcagatacattgttgatgaaatcaccaacaacaactgaaaaagatcggattgctatcaagacattagcagaaatcgcagacgttgattttgaatcatatggtcttgaaatgttaaaagctggtactaacttagatgataagagcgaagctgaattaattgaagctgatgctaaaacattcgatatggctggtaaaaaagttcgtatcgatcaagttaacacagttgatatcgaagcggtcttcaaacgccaagctgcttttgaagctgctatcgaagcagacaacaaagctaacggttacgacttattcgtacttttgattactgacatcttaaacagtaactcagaagcgcttgttatcggcgaaccagctgaagccttcgaaaaggcttttgatgtgacattaaacaaccatcgtgcccaattagccggtgttgtgtcacgtaagaaacaagttgtcccacaattaacagaagctttttaatagtaactaagaaaataaagtcctgcggggctttatttttttgctcttttacagatgataatgattataatctaacggcaaacatgttataatgtaagagaattcacaaggaggccgataatgatgaaacatacgttgaagttagtactcacaattgtggttgggattaccgcattagtattagcctttttatgtcaagaaccactgtgggcccaaatattggtcagtctagctggtggcttagttgcgttatcgatgctgattgagatgattcgtactttaaaatctggtcgatatggtgttgatttactagccattaccgccatcattgcgacactcgctgttggtgaatactgggccgctttgatggtcctcgtgatgttaacgggcggcgattcattagaagattatgccgcgcataaagcagggcgggaattaaaatcgttattggacaactcgccacaggtcgcgcatttaatgcgtggtgacggactcgttgatgtcgctgtcgatgagctccaagtcaatgatcaagttgttgttaagccaggagaacaggtcccggttgacggtcatatcattgaggggtcatcattgtttgatgaatcgtctctaaccggtgaatcacgcccaattgaaagaacgattaatgagccaattatgtcaggatcagtaaacggtgagacatcaattaagatggtggtcgatcaattggccattaacagtcagtatcaagcaattgttaaattggttgaaagctcagccgcgcaacccgctcattttgtgcgtttagcggatcgttatgccgtaccatttacattagtggcgtatttgattgcaggtgtggcatggtggctctcgaaagaccctgtgcgctttgccgaggtcttagtggtcgcgtcgccatgtccattgattctcgcggcaccgattgcgctcatctcaggtatgagtcgtgccagccggaacgggattattgtcaaaacggggacaacgattgagaaattagcgctggccaaatcagctgcttttgataaaacaggcacgattacgaatggccaattaaccgtggatcaagttgtaccggagattgatattgaaccatcggagttatgtcgtttagcagccagtgctgaacaggcttctgcccatattctcgcgcgttctttactacaagtcgtccccgcagcacaattattagagattgttagtttaaaagaaacaacgggtgctggtgtgaccgcccaattagcatccggacagacggttcaagtcggtaaatttgaatttgtggcgcctgaccaagctaaacaaccccagacacagacaactgtctacattggtgttgacgggcgttatgcgggctatatcacatttatcgaccatcttcgccaggaagcgcctcaaacgatgtcaacgctccatcagctcggtttacagcgcttaatgatgctcacaggtgatcaggcgacaaccgcaaaagagattgcggctcaagtcggcattgatgaagttcacgctgggtgtttgcctgccgataaaattcgactcatcaataatgttgcgccggagcagcggccgataatcatggttggcgacggtgttaacgatgcaccatccttggcgagtgccgatgtcggaattgcgatgggtgctcacggtgccacagcagcgagtgaatcagcagacgttgttatcttaaaggatgatttgagtcgggttagtcgcgccatcacgattgcacgggacacaatgcgggttgcgcgccagtccgttttgattgggatcttcatctgtatcggattgatgttgattgccagtactggtgtcgtgccagccttaattggggccttattccaagaagttgtcgatacagtttcgattttatacgcattacgtgctagaaatgaccattaaaaaaagaggccgttaagggcctcttttttgttattaattatttttcagattggacttttaaaaacatatcttttgggaggtatagtttcggaatcatcgctaataagattccaaagacgataccatttaagatgaagccggcaatgaaactaccaccgttaatagttaacgaatagagccaagcattcattcctttaggtgcgtatgagccccagtagattgccccagctaagaagtggcagaagtatttggcaaaagtaccaatgaaagctgcggaccagaggagcgcaattgtttttactttggtattttgttggatacttgcttgaactggtttttgtaaaacgccagctaggccaacgaccatgaaggcaatcgtaaattctagtaatccttgccaaacattgagaacacttccgttaccaagtccacgtagaaccaggtctaaaaggccccagattaaacccgaaaccattccagccgcgacgccgcgacggagactatagataataatagggataatcccaaaggaaacttcaatcgctgaaggccctactgtatgaggaatatactcgagtgccatcgcaaacgctgcgataatagccccttcaatttgaatcaataaccgttgatgttgcataaaaataaccccttttcttggttaaccaacacaaaaaaggagttaaagtttcaactccatcacaattcctacgcttgtcttaacaaacaggttcgaagggtctgatcatttaatcactctcagccaatggctcccctttgtgatggttaatatttaaattttaagaacgttttcagtataccggatacaacaaagatgtcaagcaatcaagcttcactcgagcttatccattgctgagcgctgttcgtcatcaaccacgtgcgtatacaaatgtgtcgcttgcgtggttgtttggcccaattgggtcgccacaatcgtttcgctgtgggtcgctgacatcagatcggttgcgagtgtatgacggaatttatgcggcgttagacgaacgccaaaagcttctgaatacttagccactaacttttcaatggcgtagttactgattcgcttcgcttggccgcgatatttggcgacaaataaggcccgttcgttagtggctgaatagcgctgttgtcggatttgaacataatcttgcagataaggtagaccccaaggtgcgatgggcacggtatcttgttgaccacctttgcgaataaccgtaattgttagctgctcgaggtttaaatcagaaacgttagcttgagcgagttctgagaggcgaatgccggtagtgagtgccaatacacaaatcgcaatatcccgttcacaattctgcgtataagaagcgagttggcgattagatagcgcactgggatagtcgacttgcataaaggcaatgaagtcgtgttttttatcaccggtgagcaacttttgaccgatatggcgggaacgagtggccattgtctcggaagatttgagtagtttaacttttttcatgacgttacggtagaaataaggctcaccatcggcttgttcggcttcaatcgtcaggaagtaccagagcgcattcaaagcgttgatagagcgattgaccgcctggaaggagagtttatgattatttgcttttcgtttattcattaaaaagatcttatagagttcgatatcttctaatttcatcttatcaagcgcgacaagagggatatccttagtcgtttgaacagcaacaatttgttcgtcaattaaccaggagaagaagcggacgtattcttggagatattgatagagcgttgcagaggagtatgcattggcttgccgattaatataaaatttacggacgtaatcgggaagatccgccaagcgttgttcacatagttcgagataacgttgttggtccatgattgaaaccaccttaatagagaattatagttattttaacaaaaaagcggcgagaatactacaagtgttgttaaaaccataattttaacaacacttgtttgtcgaattttgaccactaacccgagaactcagtttttaggccacctgtagcagccatttaaaaacgaataaaatgcctgtttaacggtctttcattctattaaaacgttgatataacagcatttatagcatgattaggccgatttgagcatcaaattagcgtttaattgaactcggattatggttaatgattatcaatttgagcctcaaaattatggattttacagctgcataaatcaatcctaagttatttaacgaatttcatgtggttattgatcattaataattaggcaatggttttaatttgcgatcagatcagtaatttagcattgagatttgttaatcgtagttgagttttttaaacggttgatgttttagttaaagcattttaaaacgttgctaaaagaatttgctaaattaaggacttaaatacagattaataagtcgaaatcagccactcttttaaaataaatacacacttcctataatatatattatgtaaactagaatattttttttatttaataggtcccccacaccgtctttaatcaccgtaatcgattatttttatgttgaaaactagattaaatttaattgaactgcttggttatttgaactagctaaaaatggcaccaaacagtactttagaatttagcacaggccatttaaaaaaagcccagatactggttaaataccaatagctgggctttttagatttactttagtcagttagtcgaattacaactttaccggctaatttaccattagcaactaattccagtgcatcttgaacgtgatcaagatcaaaatcgtgtggatcgatagctggtgtaatgtgatgtttttcaactaattcagtgacttttttaagttgttggccatccgaacgcacaaagatgaagcggtagtcaacttgagctttactagcgagtttatcccacttcttaccgactaaaccaaataaaagtcgtttccaggcaggtaattggtgcgtgatagcaaaatgcttattaggacctgccaccaaacttaataaacggccaccgggtttcataattgaaagttcacgttcgatatcttgagccccacgagtatcgataacgtaatcgacatcgtttaatacctgccaataatcggttgtccggtaatcaaggtattggtcagcacctaattctagaatatgctcacgtgctgcagcgttccctgagacaatgactgttaagcctaaagatttagcgactggcacggctaattgaccaaaactgccagaaccaccaggaatgaaaatcgtcttccctgcttcaacagctaattcttccgtgaggccttgataagcggttaaaccggtcaaggggacagcaacggcctctttagctgataaattggtaggtgtataccagatagcattggcatcgaccgcaacgtattctgcaaaaccaccaatcttagcaagtggtagacgtgtgtaaactaggtcacccggtttaaaaggcgttacgttagaaccgatagcggtaatttcaccaacgacttcattgccaagggttaatggcatcgaatagtcttgaatcaacttaacactgccgtgaatattcattaaatctaacggattgactgcggcatagctaactttgatgagtacttcgttagcttggggcttaggggtggcaatttctttcacggtcacattgagatctttactatattttgtaatttgagctgctttcattttaaagtgcctctttccatgggagtatttgaagtgtttggtgtgctgttacgattagcgcctctgaatctggatttactttagccatgacacgaatgccaaccaatgcattttgaagtgttgcggctaatagctcgctcttaataggaggctgcaactcagcttgcccttcaatcagtaatcgctgcagcattgcttgttcctgctgtaaatagcgtttaataagttgttggatatcttcttctaacgttgataacgcggttgccgtattaacgactaaacagccgtctggttgttgtgccgggtggttaatgaacgcctcaaaaatggctgtcaaacgactactaaggtcgctataatcattgatgatttgattaaatgtcgcggtgatttgatcgtgataatgcgctaagactgcgataaatagctggtgcttatcaccaaacgtatcataaatactacgacgatggatgcccatttcgtcgactaggttttgcatcgacgtttgttcatatccctggcgccaaaaaacgagcattgctttgtctaagacggctgttgtttcaaattctttcgtgcgcatctgataatctcctcttattagaacgttcattctattatagatgatgactctgaataacgcaactagattttacgcaattttaaacgcaaaaaaagaacgtctcatgaagacgttctttggtgatactatttcgtaaggtaaaaaaccccgaaggcccccagaccaacgtgactcataataacgggactcgttaaagcgactgtataagggacgtggggttgggtttgttctagcgttccttggattttggcggatagttcgtcagtgatgccgacgtgtgaaatgccaatttcagcaacatcttgagtggccaagtgttcgcgaatattattgatttctttggtgaaggcctttagcccccgtcccttagcaatcacttctaattccgtatctgttaagcggacaatcaccttgagtttaatcagttttgttaagagccccgccatccggctaatacgtccgccgcgttggagtgcatctagtgagtctaaaaagacgtaggtttctgtcttgctacgaacctcattaagatgggcaatgatttcagtgagtgtcttccccgcttcaacatcttgagcggctgcgacaacttgataagccaggccacggtcaatttctttactatcaatgacgtggacgtcacttgttgattgttgggccgctgtatgcgccccttcgatagtcccgctgagtaaccctgtgcagtggattgataagattgtactgccatcagcccccaattggtcgtatagttcaacgaaactgccgactgttggttggctcgttgttggaaactcagtcgttgcactttgcaagcggcttaaaaattcggcacgggtaattgtttgaccgtcaacgaaggattcagcaccttgttgaatcgttaaaggcacaatatggatatcataccgttcttgttctgctgtagttaattgaattgatgaatcggttactattttaattgtcatgtgagtgatactcctttgagtcaataatttagatgttcagataaattgaaaagaacattaatgtcgttccaagcattacgaaaaagtgccaaatcaaatgtaatccaggaattttaggaaaactgtagattaaggcgccaactgtgaagacgacgccaccactgacgagcaaccaaaaacctgagggtgataagttagtgtataacgtcttgcctgccaataagcataaccagcccataataacgtaaatgctggtttctagacgttggtagcgaccgtggctaaaaatatgtgttaaaatgcccgcaattgcaagtgtccaaattgcaatcaatagactaatgcccgccgtatgcccgataaaaatcaaacagtatggtgtataggtaccagcgattaacaagaaaatgttactatggtcaaatatctggaaaacccgtttggctttagtaaaggctaaacagtggaataacgttgatgcgagatacagcgctagtaatgtggcaccgtaaacgattagactagcaatcgcaactggggatagcgatttttgaacactcttgacaatcaggaggattaccaatgctaggctaccaaagaagcccacaccgtgtgtaatggcattccaaacttcgtagataatttgttgtcgtttattagtcatcatatgcaaatgatcgcctcttttttctctatttgtcgagtattatagattgatatagaatataagtcaactaaaaatagaattgcattctacgtacgtgacaaatgattaacgctatggcataataaaagaacaaacaagtcggtcgttaaggagtatcgaaatgcaatctcaagaatttaagcagtggcttagtgactttcaagccctgcgcctgccgcaatggggagattttccggatctagagttatatatggatcaagtgattaatgaagtcaataagcaactagagccactcttgcacgttaagattacgaaaacgatgattaacagttacgttaagatggccattattgaacggccaattaagaaacgctataaccgcgatcatctagctgaattgattattgtcagcattatgaagcttgttttcccgctagacgtctgcaaaaaagggattcaacaagccctagataatactagggcgagtgaagcttatgaccaatttgtggccctttttaacgatgaaatggccaatattaatgcgcctgccagcgtcaatgaatttgacctcagcgaatcgtcgttggctattgtgcaaaaagtagctgttaaatctgttatttataaactcattggcacaaaattagtcgaaattggctaaccgcttacatgattatataactaaaaaatggtttacagcaaacttaattgctgtaaaccatttttttaaagcattatttaatgttattctttcgtaaaatccttaatccaagctaaggcaattgccttttcacctaagtgggcaccgataactgggccaaaatagctaatatcaatcggtaaatccggatgtttttcacggagcttatcacgccatgatagtgctgccgcttcatcgttggcatggataatcaatgcgcgtaatggggagtcaacacgttcttgtgtttcttcgaagatttgttcagcgcgggcgtatgccttcttcaatgaacgcaccttttcaaaagctgtaatcttgttggtttcgtcatcaaatgttaataatggcttaatttttaacatgctaccgataaaggcagaggcatttgatagacggccaccacggactaagttttgtaagtcgttgacgatgaagcattcatcaattgtgcttcttaagtcatcaagacgggccgtaatttgttcaacagtgacttctggatcgcgcgccattctggctgcttccattgctagatagcccattaacatcacggtaatcccagaatcgtaaggcacgacttggacattatcgatggtgctggccgcatttttcaaagttgtcacaaatccggagatcgtgctggcaaggtggatactgatgacggcatcgtagccttcgttgcctagatcttcgtataattttaacatctcgcctagtggaggctgtgaggtgcttggaaatgtttcggctgtttttaatttttgatagaactcttcagatgtaatgtcgacgccttcatcgtacacttgtccatcgagaatcactgggatcggaacaacgtagagatgatggtctttcacttgctgttctgtgagataagcagtactatcagtgactacagcaattttcatgttgacacctacttttttattattcggtaataactatatcataaatgacgggctaattcccctattaatcgcttttttcaaaaagttgtataggccctctccctttagtttatcgttataacggcgatgataacggtttagctaattatgtaaattttaaacacctgcagttagttagcagatacgttaatttctttgaggttctgtgccaaaacagttacaataagtaagataattctattatagaaagtgtgaccaataatgacctttgacggtttaatgactcacgccgttgtcaacgagctcaatacaacgcttgccgacggtaaaattactaaaatccaacagccttatgccaatgaggtaatcttaaccatccgggctaatcgtaaaacatacccccttttgttatctgcacacccatcctacgcacgggtgcaagtaacgcgggtgccttatgcgaaccctgcaacgccgcctaattttgcgatgacgcttcgtaaatatttagacggtgctattttagaacagattgaacaagttgaaagtgaccgaattttgcgtctaacctttaaatcccgtaacgaattgggcgacatgcaaaaactatgtttgattgtcgaattaatgggtcggcatagtaatgtcatcttgattaaccttgaaactcaaaaaattctagatttaattcgccatgtcggagtttcacaaaaccggttccgctttttaatgcctggggctgactacgttaatccaccagcaccaaccggtctaaatgcctttacgaccgatctaggaactcttgattggttaagttactataatgaagatgccgatgaacaaattcattggttacaacaacaattccaaggcatgagccgcgaaagcgcccttgaattgcaaacccgtttaatggaccacgataactatttagcagtcgtgactgattttttcaagcagtttgaccaagcacaacccacgttaacaattggggaaaagaaatcatggtttaccgcttttccttatcagagcctaacagggacgcagagccatttcgaaacgctgagtgaactgttagaccaatactatcttcataaggctcagcgcgaccgtgtgcagcaacaaggtggggccctcattcacttcattcgtaatgagattcaaaaggatgaaaagaaacttaaaaaactacaaaaaacgcttaaagcagctgatagtgccgacgattatcggatcaaaggtgaaattttaaccacctacttacgccaagttgaacgtggcatgaccgaagtgacactccctaatttttacgataacaatgaacctattaaaatcacgttatccaatcaaattagtccttctaaaaatgcgcagaagtacttctcgaaatatcaaaaactaagaaactcgattgcttatgtgaatgaccaaatggctaagacagaagctgaattacaatatttctacaccattatggcccaaattgagatcgctgaacctaaggatttggaagatatcaaggccgaattacaggctgaaggctatcttaatattaagaaaacaggcgctaagaaacaaaaacgctataagattagtgaaccagaagttttctatgcgacagatggcacgcgaatctttgttgggaagaataactatcaaaatgatcagttgaccttgaaaaaagcgcataaaaccgatatctggttgcatgttaagaatattccgggttcccatgtgattattgatagtccgacaccgtctgaacaaacgattcaagaagccggtaacttagcggcttacttctcgaaggcccgcttatcagccgctgtaccagttgattacattcaagttaagaaaattaagaaaccaaacggtgccagacccggttttgtcatttacgaaggacaacaaaccctctatacaacaccggacgaagcactcgttcagcagttacgtaataaaccagtgcaagcctaattaaaaagcgttccgccaaattaaattttgacggaacgcttttttgttggtttaggcatatgacttccgccactttctaaatgtgttctattagtcatcctattcagggttaatcctcaaagcatacccgactggtgtcacgctctttttttaatgtgcgtctgaccatgcttgtggatcttggcgccattcatttaaggatgtcgcttgttctggtgtcagattatcggcagcttgttcaacggctaataatgctgaaaagttagaaagggtcatcagtgggaaaccggcttgttcgaagttcttgcgaccagcagctaattcgtatgagaaaatcccgaaaacgcctaggatttcagccccttctttttgagcagcttgagcagcttggagcacgctaccgccagttgaaattaaatcatcaattaagaccattttttgaccggctgtaaaaggcccttcgatttgacgcccttgaccgtggtcctttggtttagagcgaatatagaccatgggtagattgagttcagctgcaatccaggcagcatgtggaatcccagcggttgcggtgccaccaatgacttcaacttctgggaattgcgctttgatggcagcggctaattgactggcaattagcttgcggaccttaggatagccaattgtgagacgattgtcacagtaaatgggacttttgaggccgctcgcccaggtaaagggttgatttgggctgaggctcactgctttgatatcgattaaggcttgtgcgacttgttcggcaattgttgtcatttgaaagactcccattctgatttgatagcttggtaagcttgataaggatcactggcctgcgtaattgggcgtccaacaacgatgccgttactatgcatctgagcagcttcaagtggtgtgactgctcgtttttggtcgttattttggctcgttgcgggacgaatacccggtgtgacgcagagaaaatctgtagccgtcttgcttttaatagtggtaatctcttgtgcagaacagatcactccgtcacagtcggattgttgcgcgagttgtgcgtaatgtgctactgactcaggcaggctgacagaaacgagttgttcctgctgcatttgggcctcattggttgatgttaattgcgtgatggctaataacttggcgggtttgacattggcttgtttagcacccgcttttaacccagcggcgccggcttgcagcattgtttgtccgcctgctgcgtgaatcgttgtgtaatcgacgcctaattggccgatgacggtcattgcgctctgaaccgtattgggaatatcgtagagctttaaatcgaggaagatccgatagccgcgtgctttgagcgttttaataagctgcggcccttcttgataaaaaagttccatgccgatttttacgaatagcgcttcatctttggggaattgttggagaaattggtctgttttttgccaattgggaaagtctagcgcgataattacgggatttgtcattaattatagaacctcctggttaacggcgaacgttttaaagtcatgtaaatcgtacttagcaagttcatcagggagtgccttgatgatattgggacaagcaaatggttcactgaaattagccgtgccaacagcaatcgcgttagcaccagctgccatcagttcgagtgcatcccccgctgttgcaaccccacccatcccaataatcgggaggttggaaattgaacgcacttgatgaactaggcggattgcgactggcttgatggctgggcctgagaggcctccagtttgatcagcgaggattggttgccgggtctttggatcaatgcgcatcccaactaaggtattgattagtgagaagccagctgcccccgctgcttcgactgccttagctatcggtcgaatgtcggtgacgtttggtgagagtttgacgtagacggggacctggctaactgcaacacaggctttcgttaaagtcgcggcggcctctggtgaagttccgaactctaagccgccgtgtgcgacattggggcaagagatgtttaattcaatcacatgaacgttcggtgcttggctaatccgttcacagacagcgacatagtctgcttctgtattccccgcaacgttggcgataattggcaggtctgggtaacgttctgctaaccaaggtagcttttcagtcataatggcttcaatccctgggttttgtaagccgattgcgtttaacatcccactaggtgtttctgccactcttggtgtggcattccctaagcggggttctttggtcgcggctttaatgataattgcgccgagtaaattaagatcataataacggccgtactcttggccaaatccaaaacaacctgatgctggcataatggggttcttcagttctaagccgggtaaagacacgtgtaaatcgctagtcattagagtaacacctcgtttgttttaaagactggtccatcatcgcatatttttagctggattgttggatcgacttttagtttcgtgacgcaggcgtaacaagcaccaattccgcaggccattcgctcttctaatgagatataagcgtttggatgttcgctgaagcgattatcgacagccattaacaagcctttaggcccacaggcatagattgcgtcgtaggttgtggcggcatctgcaaattgcgcgtcgagtaataagccgacgtgacctttgtaaccgtaagagccatcattagttgcataggcggttggccctagtttttcaaactctgcttgataaaagatagcctcttgattggcaaagccaaaaacgtgttggacttgaacgcctttagcgactaattgtctggataattcgtgtaacggtggaatgccggttcccccaccgatgattaaagctttttgctgaggcttaagttgatcaattggatagccgtgtccgcctaatggacctaagacggataattcagttccctgtgaacactcactgagaatttgggtcccttcgccaaccgtccgataaagtaaggtaatggtgttatgtgcggcatcgacattggcaatcccaaatgggcgtctcaacaggagcgcatcgctaggaattttaacatcgacgaattgtccgggttgcaccttttcttgggctaagtcacctgataaacggagttcgaaaataccaggcgcaatttcagtttggtcttgaatcgttaacagccattctagtggcaacataagcgtgactcctttgaatttttatgtaataaaagcgccaagagaccaaggcggtccttggcgcttttataatgctcagaatataaccagtttgaacgcacttcctttatagtggttttgtaaggagtgattgtgattctaggaccgttaagatggcatccgtcgtgtcgagcgatgttaataatggaatgccatgttcaatagcggtttggcgaatgacaatactatctttagccacttggggtgcttcgtttaaaccggttgtattgatgaccagttggatatggccggccttaatcttgtcgagtaagtcgcctgaagtggcgttgatcttgtcgacttgttggactgggatgcccgccgctttaaattgttgtgttgttcccggggtcgcgatgatttggtaaccaacctctctaaagcgttttgctaaagcaagtgcttgggccttatcttggttcgtgactgtcattaagacgtttccgtgacttggcagatgcatgccactagcttcaaaggctttataaagtgctttttgcatcgtgacatctgtccccatcacttcaccggttgatttcatttcaggtcctaagagactatcaacacgggttagttttgagaatgagaagactggtgctttcacgtggatgagtgggcctgctggtaacaaacctgttggactcttcaattcagctaaggtgctgcctaaaattaattgggtcgcgagttgtgccattggaatttgagtaactttacttaagaatggcactgtccggctagcacgagggttgacttcgatgacgtaaacttcgtcattttgaatgatgaattggatattcaacaaaccatgacaatcaagtgcgagacaaagtttagtggtgtagtcgataattgctgctttttgatcttctgtgaggttttgtggtggataaacggccattgaatcgcctgaatggacgccggcccgttcgatatgttccatgatacctggaattaagacctcttgaccgtcacagatagcatcgacttcacattctttacccattaagtaacgatcgattaagactgggtgttcgtctgagaccttaacggcttcttgcatatagtgggttaagtcttctggggtatgcacaatttccattgcccggccacctaagacgaaactaggccgaattaagacgggataaccaatctctgttgcaatcgttaacgcatcgggtgcgttggttgctgttttaccgacaggttggggaatattcaattcttgaattaattggtcgaataaatcacggtcttcagcgcggtctaagttggcaacgctcgtccctaagatcttaacgccgttttcttcaagtggtgcggccaagttaatcgctgtttgacccccgaattgaacgataacgccttctggtttttctagttcaacgacgtttaaaacatcttcgagtgttaatggttcaaagtaaagcttgtcggagattgaaaaatcggtagaaacagtttctggattactattcatgatgattgcttcgtaaccggccttttgaatggcttgtacacagtggacggttgcgtaatcgaattcaaccccttgaccgatccgaatggggccagaaccgataactaagattgatggtttagcggaaactaaactttcattttcttgttcgtaggttgcgtagtaataaggggtttgtgattcaaactcggcagcacaagtatcgaccatcttataaacgggttgaataccactttcttggcgcatttggcgtacttgaattggcgtgatttgccatgttttggcaatcttttcgtctgaaaagccgtttttcttaacaatttcgagtaattcgacgtcgcctttttgactacggagttgttcttctagttcaacgatgtggctgattttatctaagaagaataaatcgatcttcgttaattcagctaattcctgaatgagatacccgcgacgtaatgcttctgcgaggtagaaaagacggtcgtcttgcggatgaataatccgttggaccagatcgttgtcgctgacgctggttaaaccatctaattcaaggtgggctgtgccgatttcaagtgagcgaacggcttttaggagtgattcttcgatgttccggccaatcgccataacttcgccagtcgctttcatttgagtgcctaattggcggtcacccttattgaacttatcaaaaggccagcggggaatcttggcaacaacgtaatccaacatcggttcgaattgcgcgtaagtagtcccggtaattgggttatagatttcgtcgagtgttagaccaaccgcaattttagcggccatcttagcaattggataacctgttgcttttgaggctaaagctgatgagcgactaacccgagggttaacttcaatgatgaagtagcgctcgctgttaggatcgagggctaattgaacgttacagcctccctcaatcttcaaggcccggataatttttaatgaagcatcccgaagcatttgtacttcgcggtcacttaatgtttgaactggggcaaagacgattgaatcaccggtatggataccgactggatcgaagttttccatattgcagacgactaaggcgttgtcgttgcgatcacgcattacttcaaattcgatttctttgtaacccgcaatactctgttcgacaaggacttgcccaactggggataatgcaatcccgtttttgacgattgttttgagttggcccgcattttcggcaattccaccgcctgtcccaccaagtgtgaaggccgggcgaataattacggggaagccattttgttttacaaattcctgtgcatcagctaatgagtgcgcaatggctgattcaggaatcggttcattgagttggttcatcaagttcttgaataactcccgatcttcagcttgatcgatggcacttaattttgtcccgagtaattcaatatcgagttcagcaagaatcccacaattagcgagttctaaggccatgtttaagccggtttgacccccaagtgttggtaaaatcgcatctggcagttcttttcttaaaatttgcgtcacaaaatcaagcgtgattggttcgatataaaccgtgtcagcaactgttttatcagtcataatcgtcgcagggtttgagttgatgagcaccacttggtacccttcttctttaagtgcaagacaggcttgggttcctgagtaatcaaattcggcagcttgaccaatcacgattggaccggagccaatgactaaaattttacgaatatcggttctttttggcatcactaaatcccctttttctatttttggcggcgattaaaatcatcaatcatgtcgatgaattcatcaaataggtggacagcatcgtgtggaccaggtgctgcgtctggatggaactgaacggaaaatgctgggtactgacgatgacggagtccttcgacagtgtggtcgttaatttcaacgtgggtcactaatagttgttgtgggtcgattgagtctgcgtcaacggcgaaaccgtgattttgtgacgtgaaatcaatccggttagtggcaatttcgcgaacgggatggttaaagccgcggtgaccaaacttcattttgtatgttttagcgccgttagcgagtgcgaataattggtggccaagacaaatcccgaagattggtagcttcccttgaatgccccgaatcatttcgattgcttctggaacatcttctggatccccagggccattggttagcatgacgccatccggatcgagactgagaatttcttcagcggtggcattataaggtaggacggttaaattacagttgcgttttgataattcgcgtaaaatactgtgcttcaatccgaagtcgataaccacgatattgcgaccggtcgcaggactaggataaggtttagcggttgatacttgttggacttgatttttaggtaataccaaagcttttaattgatcaaaagcatgatcgtcggcggcatccacgatgctggccttcatagtacctttatcccgtaagcgacgcgttaaggcgcgggtatcaatgccccaaataccgggaattttcttttgttttaagaagtcgtcaaggctcatgttcatccgccagttattagctaagcgtgggacttcatgaacgaccacccctttacaagtaggtttgattgattcaaaatcatcgcggttaacaccgtaattgccgattaatgggtatgtaaaagcaataatttggccgttgtaggattgatccgtaatggtttcttgataaccactcataccggtattaaagacaatttcaccggttgagattgtaggtgcaccgaagccaaaaccgctaaagacggtgccgtcttctaagatgagataacgtttcataagctatttactcctttgataagcaacttgaccggcaactaaggtcaattctgtaccgccaagtaccgtttcaccgatgaatggcgtgttgtgacccttagattgaaagtcggttgcttgaatagtagtgggttgtgtcaggttaaaaacagcgatatcggcttggtcgccaacgcgtagttgaccggctgctggtagattgaaaacctgtgccggaacggtcgtcattttagctaataattgggctaagctaaagggcccattaacgaccaggtgtgtatagagtaaactgaaggctgtttcactccctactataccaaatggtgcttgtaataacgactgacttttctcagccgcggtatgtggtgcgtgatcagtcgcaatcacgtcgattgtaccgtccatcagacctgcccagaggctttgacgatctgctaacgttctgagggggggattcatttttaacatggcatcgtcactaatgattgaacgatcgtcgagtaaaagatgatgtggtgtgacttcgcaggtgatattaacaccatctgctttagcacggcggacaagcgccactgtttctttagttgaaatgtggcagatatggtagtgaacgccggttgcacgagcgagttcgatgtcgcgtgcgacttgggcggattcgctcacgctaggaatgccaggaacgtttaaccgtttagccgcggcaccgtcgtgaatgacacctccgttgactaatgagatgtcttcaacgtgcgcgacgattggcgcatcaattgctgctgcttgttgcatggcgaggtacattgtttgagcatcttgcacaccgtgaccgtcattggtaaaaccggcggcgcctgctgctttgaaagccggcatatcaactaggtcgttattgactaaatcgccggtgattggtgcaaattgatacgtatggacgctcgtttccgtttggttacgggcaactaatattttgaaatcgggtagattgtcaggtactgggttgaggttcggcattgcaatgacactcgtatacccccgtgagccgcagcccggctgcctgtttggagggtttctttatcggtgaaacctggatctctgaaatgaacatgtccatcaattaacccggcactcacgagcgccccttgtgcatcaaaaatggtttcggttggctcgtcagttggtgtaatttgcgcttcaatcgcagtgatccgtcctttttcatcaatcgcgatgtctcttttgacgagttgatcgtcaattaatagttgaccattttggataagtcgatacatactgcagacccctaatctttaatgagatttttttgttttaataagtattcaatcattgccatgcgcatgaagaccccgttatgcatctgcttaaaaattcgtgattggggtgcttcgactaattcatcggcgatttcaacgtcacgattaactggtgctgggtgtaaccagatagtacttgcttttaattgggcggccctttgtgctgttagaccgtatttaacgtggaaggcttcgtcggtcattgtttcggctgaatcaaagcgttcgtgttggattctgagtaacatgaccacatcgacttgatctaagatgctatcgagggcgacgtgttggccgtaatcgttgaattcagccgtaaaccattcttcaggaccggcgaagtagagttgtgcgcccagtcgtttcaaaagttgcatgttagatttagcaactcgtgagtgacgtaaatcaccgcagatgaccactttcaaaccgtcaaagtgtccgaactcttcgtgaatggtcatcatatcaagtaaacattgtgatggatgttgaccgctgccgtccccgccgttagccaaggctaagtggaaggctggatcggcgagtaactcgtcgtagtagttgttttgcggatgacgaacagcgacaaaatcgacgccaattgcttggaccgtcttaagtgtatcgctgagtgtctctccttttgaaactgaactggtttcggcttcaaaagacattactgataatccgagcttgcgttcggccatttcaaaactcgttttggttcgagtgctattttcaaaaaagaggttcatcgcgtatacgggacgcgttaattcgcaagtcgcaccttgtttaaaggcttctgcccgttcaattaaatttaaaacagatgaatttgttagttgttcaacagatacaatcgccgtttgattagtcattttgttgtgcctccaattcgatttcactctttgatttttgtggtaagatcaggttcattgcgatgcctaagactgttgcaatcgctaagcctgagaattgatattgaccaagttgtaagtaggcattcccaatcccaatcactaagattgatgagccaatcattaagttccgttttttatcgaaatcgacttggttgtcgattaagacccggagcccacttgaggcgataacgccgaagagtaagaagctaatcccgccgataacaggtgccgggatgctttggataagtgcgcttagtttaccgatgaaaccgaagatgatggcaaaaaatgcggcgccgcctaatacccaaacactgtgaactttagtaatggccaagacaccgatgttttcaccataactggtgacaggaggtcccccaacaaaagcagcgatgattgaagctgtcccgtcccctgctaaagtccggtgaagaccaggatttttgaagaagttgcgtttcgttaatttatttaagaccatgatgtggcccatgtgttccgtcattgtaacaaacgcaatcggtgccatactgaggattgcgccccagtaaagaccaggcttataggtgacaaatgggacttggaaatccgggaccttgaaccaaggagcgtttaagaccggttggaaatcaacgatgccgaacaagacggcgatgatgtaacctgagacaatcccgagtaagaccggaatcaaactcatgaagcctttgagatacatgttaaaggcgattgtgattagtaaggttaagatagcgactgcgaagaatttcaagtcatagttaccagcggcattgattgtcgcttgtttagcggctgtaccggctaatgagaggccgatgaccatgacaatcgggccgacaacaatcggtggcaaggctttgtcgatccagccggagccaattaaacttactaagacagaaacgatgaggtaaaccgcaccgacggccattgtcccctgcgcaatcccgggataaccagttgttttcattaaagcgagcattgggacgatgaatgagaaactcgagcccatgtaagctggaatctttcctttagtaattaataagtacatcagggtgccgaccccggaactaaagagtgcgataccggggtttaagccgaccaagatgggcactaagacggttgacccaaacatggcgaacatgtgctggatggataagccaatccatttcccggttgttggacgctcgtttacgtctaacaccgcatcgggattgcgataagttgattttgtcatatgaagacctccgataattaatcattaagcgataatggcgataaaaaaaggacatccctactctgcgggtatgtcctttggacgcatagtgggcgaactgatgctagtcagtcttcgccaattatgcgggcaaacccttttgctctctctggagacaattaaacggttctagctttaattcaatttttcaatggtaatgccatcatgatcatcaatttcttgcatagcgactttgatttgttcgttaagagcagttggaatgtttttaccaacgaaatcaggtcgaattggtagttcgcggtgaccacgatcgactaaaacagcgagtgagatttttttagggcgaccaagatccattaaggcatcaagtgcggcccgaattgtccggccagtgtataagacatcatcgatgaggataacgtgtttgtccgtaatatcgacagggatgtcattgccatttagttggggttcattatgactatttaaatcatgttgatcatcacggtagagtgtaatatcaagtgtccccactggtaccgtaacgccttcgagttgttctaaacgtttagcgatgcgttcagcgataaaaacgccccgtgttttgatgccgacaaagacaaggtctgaaatccccttgttttgttcgataatctcgtaagtaatccgtgtaaaaacacgtttcattgttgtgctatctacgacttctttcaccatgttcatgacactccttccaacaaaaaacctctcaaccgatattggttgagaggttacagtttgagactagtcctagagttctaatctaatggattaattcaccgtgccttctcagcctcacgggactgaaattaaaggtttctattaagttgtgataatcatagttgataaatcgcggtttgtcaattgttctcgcgtaattcctgcaacgttttttcaaaaatggctggtaatggcgcttcaaaacgcatgttttcaccggttgttgggtgcttaaagcctaaaacagcagcatgtaagaattgccctttaccaggcaatgtcttccgaggaccataagttgggtcgccggctactgggcggttaatataagcgagatgcacacggatttgatgtgtccggcccgtttctaagcgacaacgaattaaagtataatccgtaaagcgttcgacaacttcaaaatgagtgaccgctgggcgaccgtctgggacaattgcttgtttcatccgatccagttttgaacggccaattggtgcatcgattgtgccttcgtcttcttcgatattaccatgcactaatgcgaggtattcacggagattagacttagcctttaattgttctgataatgattcgtgggcttcgttagtcttagcgaccatcaataaaccggaagtatccttatcaattcgatgcacgattcctgggcggaaaacaccgttgatttcagaaagtggtgtatgtgctaataaagcattcaccaaagtgccattaggatggcctggtgaaggatgaacaaccatcccttgtggcttattgaccacaaggacttggtcatcttcatagacaatgtctaagggaatatcttctggtactaaatcgagtgagacaggatccggaatcgtgacgctaattttttcatcagcaaccactttatggttacctttagaagtttgcccgttgatttcaacgaggtccttttttaaccattgttggatttgggaacgcgaataatcaggtagtaattggcttaataccttatcaatccggccagtttcggttgtaattgtaaattcttttttttcagtcatgagtcactttctctttcaacaagatggcaataaagacgcagatgacaccacaagtaagggcggtatctgcaacattaaagatgggaaaattaataaattctaattggaacatatcgaccacgtattttaaatgtaaacgatcgatgaaattccctaacgcgccggctaacattaacgtcaagccgatgcgatatagtttttcagatcgttcagaggtataaaataaatagccaataacacctactgcgatgatggtaacaatatagaagaaccattgctgaccagccaacatactccaagcagcgccgtcattttggacgtaagtaaggccgagaatgttgggaatcacagtgtgcaacgcgccatagctaacattggcgacaatccacccttttaagagttgatcacccaccaagattaataggcctaaaataatataaagtagcatggttgcctcctattcatactgattaacattgtccttaaaaagagcgcgcttgtcaatcagttttcgtggtggggtgcaggattgtgcaatttaggtgcagtctcgttagaataagccactaatttggccgtctgcagtaacatccatattgagtgcggctggtttcttaggtaacccgggcatcgttaaaacggcgccagtcattgcgacgataaaaccggccccgagctttggaatcaattcgcggacgtgaattgtaaagtcgcttggcgcaccgagtgctttaggatcatctgataatgaatattgtgttttggcgatgcagaccggtaagtgagcccaaccatttttttcaatttgttttagttgattgatcgctttgccttcgaacacgacgtcgcggccaccgtaaatttcggttacaacggttgttaacttagatttgatgtcagcttgtggatcatataatggtttgaaggccttaggttgttgtaaggctgctaagactgctttggctagttcaatcccgccttgaccaccattggcccagacactagttgggaccgcagtgaccttcattgcttggcaaagatcttgtagcaattggacttcggcagccgtatcgcttgtaaattcattaactgacacgacaacggggacgccatagcgttgcatattggcaatatgtttggctagattactgaaaccagctttcaaggcatctaagttttcagtggttaaatcggccaaggccaccccaccgttatacttcaaagcacggatagtcgccacaatcacgatggtatctggtgttttccctaattgcggtaccttaatatcgaggaatttttcagcgcctaaatcagccccaaagccagcttcagtaatggcaatatcgcctaatttcaaggctgtttgagtcgctaagatactattacagccatgggcaatattggcaaatgggccaccatgtacgagtgctggtgtatgttctaaagtttggaccatattaggcttgagtgcgtcttttaataacatggcgatggccccggtgacttctaaatcaccaacagtcacgggttcgcgatcatagttgtagccaatcacgattttgctaatccggtttttgaggtcggtaatatcggttgctaaacaaagaatcgccatcaattcactggcaacggtaatatcaaagccatcttgtcttggcatcccttgtactggtccacctaaaccaatcaccacttggcgtaaagcacgatcgttaatatcgagtgcgcgtttccagataatccgtctaggatcgatgtttaaaacgttcccttgttgtagatgattatcaattaaggctgctagggtatttacggtggcagttaaggcgtgcatgtcaccggtaaaatgtaaattaatgtcagccattggtacgacttgggcataaccaccaccagtcgcgccccccttcatccccatgacagggcctaatgaaggttcgcgtaaggcaatgactgctgattgatcaagttggcgtaaagcatcccctaggccaacagtaacggttgacttaccttctccggctggtgttggattaatcgaagtgactaaaacgagtttgccatcttctttttcttttaaccgattgatggcttgaaagttaagttttgctttataagggccatattgttcaatatcggtggcctgcaacccgatttgttcggcaattgccgtaatggatttcatttctgtagcttcatttgcttgtgcgatttgaatatctgacataacgaccagctccttttgtttatgatagtacctagtatagccgattttgtacggaattggcagatagtaatccgataaattttatcttcgacacgtctcgactaaagtggtaagatgtaattgtgaccagttaaggcctacaacttaattggcacaatgacaatggtgtgttgacacaccactctttagaggagggattgtgatggaacgaggaatcgtgaaatggtttagcaatgctaaaggttatggcttcatcaattaccgagatgatgaggaaattttcgtccactttaccgcaatccaaattgacggctataagacactagacaaagatgatcaggtcttattcgaagtcaaagaaggcgcccgcggtctacaagcggctaacgtccaaaaaattgaagcttaacgatattaaaaaagaggacccgcgccaaaacgattttacgttttgcacgagtcctctattttttactgtttattttgaactggccagttatttgcttgtaatgtggtaatcaattgttgcttaacttttttcgataataataattgctctggttgatagtcaagctcagttgtcttaattaataagccgtgtttttgaacaattacggctgttgtttgtgccaattgaattgttcggttatatttaaataatggtcgtttaagcgctatcgtctgtgcagagatgtcgagacggtgaccaaatagattaataatggttaaaataaccgcgatgatccccaccgtaattgattgccaattaagattaatgagttcaagttgcagaattaaagctagcgtataaataaaaccaatccaagaccaaatcgtgacgcaataagcgtagtttggctgataaaataggcgtttgttagtttgcaatagaaacactccttatgcagtccatattaccattaactaggggtctctgtcagtggaaaggtggaaactttacgaatgattaaactttatacggatgcggccacacttggcaatcccggtcccagtgcagctgggattttgattgtgaccgccaaaaagcaatatcaatttagcattcccttaccgccggttgataatcacattgccgaatttatggcggttcaattaggtttagaaaagattgccacactcgctttgaccgagtcactgcttcaaattaatgttgatagtaaaattgtctgtcaaagcctcgaaaaacaatatgcgaaacattatcagcaatatgttgatcagattatcgccttagaacagccctattccctcgtgctacatcagtggttacctgatcggcaaaataaaggtgcgcaccacctcgcacaacaagccttaaaaaaatagtcattaaaaacatggcgtttcgaaatgggttttagtagactgtttataaatacacttaattagtttctggaaggattggttgcatatgatactactaacggagattatttccgcaattattttaattaacggcctctttgcggtcattaccgtcttacgacaaccgcgcgatattgcggcgacttgggcatggctactagttttaatcttactgcctgttgtcggctttattttgtacctttttacagggcgggggttatcccggaaaaagattttccaaagtcagtcacaaatcaacgatggggttttggccttagttgatattcaacgtcaagaaaatcggcggaatgagttattacctaagaaggtgttgtccagtgaagcgactgaaatggtcaatcttttcttaaacatcaacaacgcaccggttttaaaggataatcacgtaacgttatatactgacgggaccgaaaaattcgctgccttgttcgccgatattaaaaaagcgactaagagtattcatattgagtactacaccatttacaatgatcaaatcggtaatgagctacaaacactattggttcaaaaagcccgagaaggtgtcgcagtaaacgtcttatacgatgcttggggttctcaaggggcgacccaaaaatggtggcggccacttgaagaagcaggcggacatgcccggaccttctttagttcgaaacattcaatcacggattttcgtttgaattttagagatcaccgtaaaatcgtcgttttagatggcacaattgggtatatcggcggttttaacgttggcgatcaatatctcggccgtagtgctaagttcggcaattggcgtgatacacacatgcgcattaccgggaatgcggttttggcgcttcaagtacgctttttgatggattggaatgccagtgttgaagaagcaattcgtttaacttattctgaaagccacttcccgattgcagcggaagctaaccgcggcacggcagcgatgcaaattgtttcgagcgggcctgataaattagacgaacaaatcaagttgggttatttgaagatgatcagttcagctaagaaaaaattatggattcaaaccccttatttggtacccgacgatagtattatcgatgcgctcacgacagcagcgatgtctggtgtcgatgtgcggatcatgacccctagcatgccggatcatccttttatttatcgggccacacagtattatagtcagttattacatgaagctggcattaagatttacgcttatcaagacggtttcttacacgccaaaacagttgtcatggacggtcatattagtacgattggttcggctaatatggatattcgtagtttcaaattgaattttgaagccaatgcttttatttatgatcctaaattggctcgtcagctcgagcagatttatttagaagatatcaaaaacgcggtattattaacagatgaaatgattgcccaacaatctgcatggttacgtttcaaacaaaaattttcacgacttctatcacccattttataaatcgttcggtaaaaaaaagacctttgatttttcaggggtgaatcagaaattttaatattttttaggaacgttgctacggctgaaacggtgtcggtttcaaattgcttgcaatcgaattggggattgacattatccaagataatggtaactttaaaacaggaacactacacaagttgaatttagaatcattcgcgaacagccactataattagtggctgttttacttttaactaccatatctggtatttaaacattgcatgattcttttttaaacggtatactaaaattactaattaagttccacaaggagttaatcacaatggctaacattacactatatacgaagaacggctgtcctcaatgccgtatgacgaagcattttttagaaacacacaatatcacttttagcgaacataatattaatgatgaaccccaatatattgattacttaaaagaaaaagggttccaagctgttcctgtgcttgaagctgacggtgttgaaagtttctccggttttagaccagccgaattacaaaaattggccttttaagtttaagtgctgtccttaaaataggcatctacgagtgggaccaactccttgaagagttggtcttcactttttttacacccaaaatcgggcattttattaatttttttaagaaagtggtgcgctaatgtctttaaaagagattaaaactgaaaacgtaacttattatgaattgaataaccaaatcaacattccggttaacggtcaaatcccccttcaaaaggatcaagaagcactagaagcctttttagaacaaaatgtgcaacccaacatggtgacttttaaatcactacaagatcgcttaaattacatggtggctgaaaactattacgaagcggattttctaaaggcctactcaatcgattttatggaacgcttaaaccaatatttaatcgatcaagactttcattttaaatctttcatggcagcttataagttttatgcgcaatacgctcttaaaacaaatgataacggcttttacttagaagactttaaagaccgggtcttcaccaacgcgctctattttgcggatggtgacgaagcccttgcaatgagtgttgctgatgaaatgatccatcaacgttaccaaccagcgacgcctaccttcttaaatgcgggacgttctcgtcgtggtgaattagtgtcatgtttcttattgcaaacaaccgacgatatgaattcaattggccggaccatcaactctgctcttcaattatcacgaattggtggtggcgtcgggattagcttgtctaacttgcgtggtgctggtgatccaatcaaaggcatcgacggtgctgcaagtggtgtcttacctgttatgaaattattagaggattcattctcttattccaaccaattagggcaacgtcaaggcgctggtgttgtttatctgaacgttttccatccagacgtcgtggctttcttgggcgctaaaaaagaaaatgcggacgaaaaatatcggttaaagaccctctcactaggcttaacagtgccagataagtactatgaattagtcaaagaagacgctgatatgtatctcttcagcccatatagtgttgaacgtgaatacggccaacctttctcatacatcgatattacggccgaatatgacaacttagtggctaacgacgcgattaagaagacgaaaattaaagcccgtgatttagaaaatgaaattagcaagctccaacaagaatcaggttacccttatatcgtgaatatcgatacggctaataaagccaacccaattgacggtaaaattatcatgagtaacctttgttctgaagtcttacaagtgcaaaccccttctcaaattaacaatcgtcaagaatatgacgttttaggaactgatattagctgtaatttaggttcaactaatattccgaacatgatgacctctcctgattttggccattcaattgaaacgatggttcgttcattaacttatgtgaccgatcattctgatatcgatgttgtcccttctgtggcacatgggaaccaattagcccacacaatcggcttaggcggcatgggcttgcacacctacttcgctaagaatcaaatgatgtacggttcagaagaatcaatcgactttacaagcaattactttatgttattgaactactggacattagttgcttcaaacaagattgctaaagaacgtgggattacttttgataattttgaaaacagtaagtacgctgatggtagttactttgatcaatacctgaatactgaatgggcgcctaagacggctaaagtcaaaggattattcgacggcgtcttcatcccgacccaagcagactgggccgctttgaaagaagcgattatgcaagatgggttatatcatcaaaacagactcgcagttgcacctaatggctcaatctcatatattaacgatacttcggctagtctccaaccaattgtcaaccgcgttgaagatcgccaagaaaagaaaattgggacaatttactacccagcaccaggtctatcaaacgaaacgatgccttattatgaatcagcctatgacatcgatatgcgtaaagtaatcgacatctatgctgctgcacaaaaacacgttgatcaagggatgagtatgacactcttcatgcgttcaacaattccagctggcttatacgactggaaagacggtcgcacagataagatgacgacccgtgatcttaacattctcagaaactacgcgcatcataaaggcattaaatcaatctactacatccgcacatatacggacgacgaaaacgaagtcggcgcaaatgcatgtgaaagctgcgtaatctaaaagagtgcgcaataagccgggtatcttctgaggattagcctagtcaggtgaatgaccaacttgttggtcgtttgacagacgtagctaaccggaagaagctgccaattaaaccccagctgttcctcagctggtctacatacctcaaaggagttcatagacgatgacagaaaattatcatgcaattaattggaatcaagttgaagatcaaatcgataaagcgacttgggaaaagctaaccgaacaattttggttagatacacgaatccccctttcaaacgatttagatgactggcgtagtttaccagacaatgaaaaatggattgtgggtcacgttttcggcggattaacgctacttgatacattacaatcgcaagatggtatggcgagcttaaaagccaatatcagaacaccgcatgaagaagctgttttgaataacatccaatttatggaatcagtgcatgctaagagttattcatcaatcttttcaacgttaaatacgcctaatgaaattgatgaaatttttgactggacaaatactaacgaatacctgcaatacaaagccaataagattaatagtatctatcaaaatggctcaccactccaacaaaaaattgccagtgttttcttagaaacattcctcttctattctggtttctacactcctctttattacttagggaacaacaaattggctaacgttgctgaaatcattaaattaattatccgtgatgaatctgttcatggcacttacatcggttataaattccaactcggctttaacgaattagcaaaagctgaacaagaagaacttcaaaactggatgtatgatttactttacgatctttatgccaatgaagaaaagtacactcacgaagtttatgatggcactggctggacggaagaagtcttaacttacctccgttataacgccaataaggccctaatgaacttaggacaaggcgctctcttcccagatacagccgaagatgtgaacccagttgtcttaaacgggatgtcaacatcaacagcgaaccatgatttcttctcacaagttgggaatggttaccgcttgggcaatgttgaagccatgaacgacagcgattatgacttcgattaacaataaatctaactaaaaaagcgagcttcactaagaaattagtgagactcgcttttttgattgccatttattttttaaattgatttaagtaccgactagccaataacttatggaatttaacgcccaatgtgggattagacgcgtcgatatcagcgtacatcgctgttgtgatttttgtcagtaacggtacgagttgatctagttctgcttcagaaagtgcgttcacaaaaggtggcacttctcgactagcggattcgatttcctggcgaccagcagcggtcagatttactaaattaacccgccgatcactcggtaacttggtcaaagtgaccaattcacgtttaacaagtttcgcaacaaattcactggtagattgtggcgacatgcctaaacgtgaggcgagttctcgttgggataagtgatcctcatcagctagtgccaataagattttcccttgaccttcgacaatcagatggggtcgcgcttgtttgacgatatcatcatagattttactgagttgttcatattcggctaatttaccagcaactaattctgctttgacgctgtttgtcatatgtcatcttcccctttgtctttcatccagtatacaccattctaaaatttgaaaatagcaatccttgacattttagtaagggggacttactatattatttaatcaggtgacctgattaaatatgaggaggcgctaatatgcgtgaggataatgtcattgaagtcagaaatgttcaaaaaaatttggtcaaaagaaagtcgttcaagatatttctttcaatgtaaaaaaaggcgaaatatttggcctcttaggcccaaatggcgctggcaaaacgacccttttaaaaatgatgacgactttattacgccctgatgaggggcagattacgctgaatggctttaatacactaagccaaagtcgccaagcacgccaacaatttagcgtgacgaatcaaacggcagcgattgatcaagacttaagtgcacgtgataatctccgtttatttggacggttaaacggacttagcagtcaagccagccggattcgtgcagacgagttactgacggcttttgatttaacgcaatcggctaatcaagcgttggccactttttccggtggcatgcgacgccgtttagacttagcagtcagtttagtgggtcgtccgaagattttatttttggatgaaccgactaccggtttagatcctagaacaagaattcaaatgtggcaagcaattcaagcattggtggcccaaggatcgactgtctttttaaccacccaatatttagaggaagcagaccaatttgccgatcacattgcgctcattgatcacggtcaacttatcgccagtggtacacctaatgaattaaagcaaaaattaggtggcttacaactttctttaaccgtcactgagctagcacaattatcccaagcacacgcgattgtccaggacgttttaaagcaaccaatcagcgttagtgaacagacattagtcagcccacttggtggcgacgctcttccagcgataatcgtaatattaaatcaattacaaattgctaaaattacagttagtcatttaaaacttgagacaccttcgttagatgatgttttcctaaaaatgacggttggtaaaaactaaggagctcagataatgaatacaaatataataaaacgtcatactatacgtgatattctcactttaacccaccgtaacttattaaaaacgcgccacaatcccgataacgtcagtgatgtgctcatccaaccgattatctttaccctattgtttggctatctattcggcggcgtcatcgccggtagcgttcacgcctacttgccgatgctggtttctggtattttagttcaaagtattttaaatgcagcttctggttctggccaacaattacgagaagatattaataacggtatcttcgaccgttttaaaacattaccgatttccccaatagcaccactggcagggcaattagtaggtgatattttgcgattagtgctttctggcggaatggcgattcttacagcggtgataatgggttggcgccccaccgtcaatctgggggcactgatcggggcattactactggcggtctttatcggctggtcaacttcttggatttttgccttagtggggttaatggtcaaaaatgcagagctgatcagcagcttatcgatgattattatcctcgtgttaacgttcttatcgaacgcctttattcccatcaaaacgctgccccattttttacagccagttgttaggattaatccggtcagcacaacaattaccgctattcggacgatcttaaatactggcagttggaacaatacagcgacaatggtcctcatcagtggtgcgctgattatcgcattatttatgccattgacgctgttagcttatcaacaccgctaatagtgattattaacaaagtattaatttatcgaaaaacgataaaaattaattgtttatcgatattaaaatgttataatcaagctattaattcattcaatgaggtgtttgatatgttaaaaaaatggcttttacgtttagcacttttaggaatcggcgcagtcttcttcctttttagctttttagttaccgtccagattgtgacggcagctaaattagactatccttttgaaattatcacgttggccctggccgcttatagtgtgacaatttgtgtgtgggttgctttatatgcgctgcatcgcattctcaatacgattgaacaacaccaagtgtttgcgccaaaaacattgcgttatgtatcatcgattagaaatgcggtcttaatcgcaagttttgctagtttattgtcacttccctttttctatcggattacgcaactagaagatgcgccgggtttgttgttacttgggattgcgctcatctttattccgtttgctttggccattctgatgcagatcgttgaagacctatttaagagcgctattgcattgcagacggaaaacgacctcacagtctaaggaggatttaaaatgccaattcgggttaatttagacgtcattctggcccaacgaaagatgagtgtcactgaactttcacaaaaagttgagattaccattgccaacctttcaaacttaaagacggaaaaggcaaaagcgattcgtttttcgacattagaacgtctttgccaagtgcttgactgtcagccaggcgacctattagaatatgtagatgattaagaaaacccggataaatgaccattatccgggttttttagtaacttcctttttgttagtccctttttttgaatctgtagtataatgagaaagtagtgaaaatgaaaggggttttatgctgatgtattacgttgttatgaagtcaaatgatattcgccgtaacctggccaccgaacaatatttaatgaatcaaaagaactttgatgaaccattattgcttttctatattgaaaaaccatgtattattgtgggtcggaatcaaaatacgtatgaagaaattaatcaaaaatacattgaggataatcacattacggtgacccgccgcttatctggtggtggtggtatttatcaagatctcggcaacctttgttttagtttcgttgtcgatgctgattcagaacaatttggggatttcaaatcttttacgcaaccaatcgtcgatgcacttcacgaaatgggcgcaacatcggctgaagtctctggtcgtaacgatatgttagtcgctggtaagaaattctctggcaatgcgatgtataccaaaaacggcaaaacgttctctcacgggaccctttcatggaacgtcgatctagatgtcctcacacaagcgttgaacgtccctgctgataagattgcttctaaaggcatcaagtccattcgccagcgggtaactaatttaaaagaccacgtgaaccctgaatatcaaaatatgtcgaccgaagaatttagagatgtcttactcttgaacctttttaatgccaaaagcttaccagaaattgccgatcgtgaatatcaattaacggcggcagatgaacaagccatcgacaagattttcaatgatctctatagtaactgggactgggtttatggcaagtcacctaaatcaacaattcaaaagcggaaacactttgattttgggacgattgatgcccgcttattgatcgaaaatggtaagattgccaacgttaaattctacggcgatttcttcggttcaggtgatgctaatgatttagcagaaaaattagccggaacgatttatgaccgtgaacacttagcggcagccctcgaaccaattgacacaacgccttactttacaggcattcctaaaacagaattagtagaattattagcgcaataaaaaaagtgtgccgtaactcggttagagtgtttcgtcagccgggcaggtcttgaggattaacacaaaatagcgaatgattgcgtagcaatcgtttgatatttagggttaaccggaaagagttggctgacagaacacgtttagactataaaagttcagataaataaaagaggctgagacaaaatttacttttgtcttagcccctttttcttttacgcgatgatttcagttgtgatttcttctgggttaaaggctgcctgaaggacggttttaacggtttgttcaattgccgctaattgtgctggtgattgtccaaaagcatagacaacaagcatcgcttctgtcgtttcaggggcaatcatggcgcgtgtggaatccgaaattggactgccaaacgcatcttgttgatcgactagtgttggaaagtgactgatattaatcgcgcccttaccaattccagcgtactcggccccttcttcagcgacttgataactgattggaccgtcgattttagctaagtcgtaactgccaatcggtagttgtagcttcaaagagagataattattcacatcaactaacgcattaatttgatagagcccctgtcctttaacgacgcggcgtaataaactatccgaagatgggcgatgacgtgctgcatcaagaccgactgctttatacgcttttttcgtcgcggtgatgttaggtaactcgcgaatttgttcgagtgttaaatcggcttcgatctcattgagtaatggggttaaagtcgtgtcccaaaatgcagtatcttttttagaattagtgaatccaaatgttgcggttaccaattgtgcttgctctaagtttgcttgtttagtgattgtcatgtgtaaatcctccaatttgtgtttaatgcacggaattagcggattgttgggacatcacattcaaaaagtggtgaatataacatattgatagcctccttagtactgataagtattcattataatcaaaataacactaaaaaacaatctgggaacaaaaagtcgggtaatgactatcatcattacccgactatattcaattaagctgaacgacgccacttgagcgcgatttttttggtttgcatgaagtattggcagacccacgcaactaacaatgggaaaacaaaactggtgaaaacagttagccagaaatacggactcatcacaaccactttagcagctgtcataatgctagcgttattgaaattgagcgctgtgagcttggtccaagtgggtaagattgaattaataacgggatgaacataatgttcaaaaagaatatctagtactacccataaggtaatcacaatccaccaaatcttacgttcaaataaagtaataaagctgctaatttcgatcccactagcgatcacaatccaagtaccgataatcatgatgaacatgagatacggatcaaacagattcgtattgtcttcgatgtgtgattggaaaatggcagctgttgcgggataaaaaagcataaaggtcacaagctgactacctaatagactaaccagatgtgttgcataattcgtttttctggaaatgccatttagaatcccaaactcaaaatagggtcgggtcattgtgaacgaaagggtaatgagacagagttgggtaactactaatcccatcgttattaaactccctattagaataccgagagtaaaccctttagtgcttaaaattaattcactggcagttgttacgacggcaccaattgctaatgcaattagcaatgttttccaaatggccgttaatcgatagcgtaacattgctttaaacatgctgttcacgccccttttcagttaatttaatgaagattgtttgcaaatcgacatgtttgattgctacgcgatcggggatcacccggtctgcgggtaactcagtgtagagatagttagtgtagagtgtcccgatttgttcactcgctaagattggtaattcctggcaatatgccaagacgtcttctttaggaccgctaatttgataactgtgatcgaggaccgtttctagatcatcatcaataatgattcgagattgatcaaggattaaaacgtgttcgattaagttagcaatctcttcgataatatgagttgataagacaaatgtccgtggtcgattttcgtaggcttccaaaatatagcgatacaataaaacgcggtgattagcatctaacccgagaattggttcatctagaaaaacgtaatccgctggtacgcataacgcgacaattgttttgaaaattgtccgatacccagttgagagttgattaatcttttgtttgggattgagttcgaaatcagctaacattttatcagcaagcgtttgattgaaggccccttgtaataaggcggtatctttcataatctttttaagccgattttctttattgaataggttttgttctgacatgagataaatggcttgtaaagaatgatcacgcccggttaacggtgttttattccatttgattgtgccacttgaagcagaaatttggttcgctagaatgcttaagagtgtactcttaccagcaccgtttcgcccaagcaagccatagattgtatttggttttaaagttaaattgatatcatctaatacaacccgattaccgaattgcttaatcaaatgttcagttgttaattcagtcattttgatagcccctttcaatcagtgcaattaagtcgtccttcgataatttcagttgttgtgcttcggtaataaacgctgcgacgtagtgatcaaaaaattcatcttgtcgctgttgattaatttgtttttgtgctgttgtcgtgacaaacataccgcgccctcttttcttttcaattaaccctttttcgacaagctgattcatgccctttaaaacagtggccggattaatattaaattgtcgcgatatctcggttgttgaaggaatctgactctccggtggaaaaacgcctgtaaaaatgcctgcttcaatttgatcggcaatctgtcgatagataggcgcttcgttattaaattcaaaaaacaaaggatcacccacttccgttagttgattggttagttacttatgtagttaactataacactaatgtttaaaaacataagccggtgcgttaaacatttgattttgaggatatatttagctattatgtacttataatcaaatgtttttagggaggttcatgatgcaagctgcttattgttttatcgatttagttggtagtcggacaaattttaccgatcagactcagattttaaccttattacagcatctgcaggaaaaactgaatgaccgttttccggatttactcaccccttttatggtaaaagatggtgatgggctattaggtggttttcaagccgcagaacaatcgcaattggcagatctatttgtcttttgtaatgcctatttacgaagtgtagcgtttagacaattctggcaaccgctttttgggtcaacagacctgccggaattttattttggcgttggcttaggaaatttagtcacagtcgaaaagacagattatcaagacgttaaccgtgtaaatggttcggcaattgttaatgccttgacggccgttgaccaggcgaaacgcttaatgcaaggggcaactttacccctcggctatccgttttcgacctctctttttaaatggcaattagttactgattggtccgcagagaccgctaatggcattagtgcccttttttatttaatttatgaacggctattaaacacgaagctgcgaaaagagacgtttgctctactttatgcgcaaccgaacttgaaacgttatgagctggctcaaattttatgggaagcatatggtaatacaacttaccaagtggattatacgcagcaaaaagagcgtgctgtcgcttctagtaagatcagtcggttgctcaatcagatggattacccgctcattaagcagacgttaacaacggttcgagcgcaactaatgagtttggcggaggtgaacgtatgacgttatttgcgattttgctattagcccatttctggacggattttttaatccaatccgatcagatggcccgatgcaaacactcaacgaaattggcggttaaatggtacccattattggggcatgcgttgacgcaagtaccaatggtggttggcatctggttaatcggaacgctactacgtgtcgcaaactggccttcacttgaaacgttcggaattagcttaataattatcgtgctaatgcattggctaatcgacgtcactaaacagaattgccagcccattttgaaacgtgctttacgcttaaaacccaatcaagtccctctaatcagttacgttttagatcaggttttgcatttagttgtgattgtcattgttagtcaattattagggactcattggcagtcaagcacgattagtcgctggttgttagccacaagtgtgatgattgcgacattatattttgccgattatttcatcagcttatttttaaaaagcttagatttaaatgtggaacgactaccagaccgagcacaattgggtcggcatatcggtcgcttagaacgtttggcgattctgttattatgctataccaataatgttgcgagtatcgcggttgttgtcgcaatcaaagccctcacgcggtttcgcgccatcgaagccaatgaacatcattttgcagaatactacttaattggtagtttattaagtcttatctttggttgcttaggtggttatttacttaaactcatttaaaaatacataaaaagccgttcggataatttatccgaacggcttttttgagctatattagcgtgttagtcgctgatgttggtcaacgaaatagtaagtaagaccatatataagaatcataactggccggtaatcattgaaaaatgggattttaatccaaaagctaagcagtaataaaatgacaaaaattaaactaattaaccggaaaatcatgcaaccattccttccaatgattaatcgctaatcactaataacgatttaatagcttggcgttgatccattgcttcgtaagcagcttgaatatcatccaaggtaaagcgttgtgtgaagaccttaccaggattgatttcgccctttaaaacagcatcgagtaaccgtgctttatcatgggttgtgactgccgcaatcccaccacggaggccgatgttcttacggaataagacgttggtattcatttctgccttttgtggaattccaacgcgaccaataacagcgcccgcaccagcaacggctaccgctgttgcaacggattgttcagtcccgacacattctaagacggcgttagccccagcgttgtcagttagcgccatcacttttgcaacagcttcgtccccacgttcagcaacaatatcagttgcaccgaattctagtgctagtttttgccgatcttcatgacgactcatggcgataatctgttctgcacctaataatttagcaccgattacaccacataaaccaactgcaccatctcccatgacgaccactgtgtcaccaggtttaacttcagcagaaacagcggcgtgatacccagttgccataacgtctgaaagtgttaagaggttatttaacatctcgtccgaataatcagctggttggccagggattttaaccaggccccaattagcgttggtataacggaggaattcaccttgataaccaccattgccaccgccttcttggtttgtacaatcaccatcgaagccagctaaacaagcagcgcagtgtccgcaaccatgtgtaaatgggacaattacaaaatctccagctttaatatcagtcactgcttcaccaacggattcaacaacaccaattgcttcatgtccgactagtgatcctgattcgcgttttgaaaggccacgataccaccataaatcagagccacagacgcaagcccgaataatccgaataacggcatctgtcttcttttcgattgttggtttaggtgcctcagtaatcaccatttttcctggttcaataaaagttgctgctttcataaaaacatctcccaaaatttttttgaacgtgtttcttcctattatatagcgaaatttctaaacacaattacaacttatataattgatatctctactatacaccttgaagctcactttaaggcaagccttttttaaaggccgattgctaattgttgtttcttacttaaaacttcatcttgggtaatcccaatataatgtaaagtcgtttcctgtgttgaatggccaaaatcaatcattaatgaccgcacatcaccaaattgtttatagaaccaatacccgtaagttttgcgcattgtatgtgtgccaatatcattgcggccgagtttcttacccgcctcggttaacatacgataaacaccattgactgtaatgtgactatcaccgacgcgactcccgaataaccagtcgttaccagtcagttcattgttttgaatatataaactaatgtagggtcgcaaactggttaaactaatttgacgccacttacctgttttttgttcgacgatgacggggttgtcttcaatcacgtctttcacttttaattggacaatatcagaacaacgtaaaccggtattgatacctaataaaaaaagtaaataattccgactacccatttgggagtgtcgtaagataactttcatgtcctcaatctcgtctttggtccttaaaggctgtacgtttaattttttgccttttttagttcgtgattttcgcattaaaattccgtccttttgaccgcattctttttacttatatcattataaaccatgcggtcgtattttgcacccctaactatcgttgatttaaagggattccgagcgcattctttctaccaaaagcgtgcgctcataccgataaataccagaagtggttcaaaggccggtctaatcacgtttaaaacacactaattacgagaggcgcattttaagcacatttcagattaactaacggacaagtggtcgttaaaacgtctcaaatcacggatttaaaaaaggcgattttacttgttcgaaattcgtaattgttgtacgctaaaaagaaaaaatagaaatgagattagtgatgttaaattataacgcaattcaaaaagcggtcgacgctgaacagaatgctagtgactttccaaacttaatgcaggcctttaaaaaaatgggtgtccttaaatatgattaccttgttgaatccggaaaatatcgctattacgataatgatggttatcttgattttaaaatgaatggtgtgccacaaaaggttgcccctaaaagtaatgccactcaaattaaagctgcggtccaaaaagcgcagactggtcaaatcacttttgaagtgttttgcgagctagctgcagctgctggcattatttattggcgaagtgatctaacccaaaaagttgtcagttattacgatcgaacagatgactgtttattagcggaaccaattcctggtctatagaaatttaaccacaaaaataagacttaacactgatatagtgttaagtcttattttttagtaaccagccgataaatcaacttggttaacagcgagttgcccgtccgttaagaagactggtaaattctgttcgaagattctaaagagtcgttcgtgaatatctggaatgtaacccgagatatgtggggtgataactaagttggttgtcgtccaaagtggtgatgtttctggtaatggttcagtttgcgcaacatcaattgcggcccctgcgagatgaccattattcaattgtgccatgagcgctgtctcattaattgaagcaccacgacctaggttgaaaaagtagtgcccttcacccattgcattaaagaatgccgtatcgaaaaagttttccgtttccggtgttaacggcatcacgttcacaacgaaatccgcatcagctaatttcgtttgataatcttgatccgttaaaatttcgtcaaacgcatcgcgtttttcaccgtgacgattaatcccgatggtttttaaccccaacgctttagcgtaaacggcaatctgatgaccgatttggccggtaccaaagaccataattgttcggtgctcaagtgtttcggtcgcgcgcccaatctcatgatggcgccattccttgttagcttgagaactcaaactttgacgaataccgcgagtgaaatataaaatataactcatcacagtttgtgcaatcggaacagcgtgcatacccttggcatttgaaacgataatgccttgttcgctcaatgttgctaatggtaaatagtcaacaccagagctagctgcttgaatccatttcaagcgatgatttggtgttgctaaaattttaggccccaccattttattccaaccaaacataatatcgatggttgccaattgttcgggttgtacgttatccaaattaataatggttaacccttgttgctgtaaatcttctacgtgttgttcaggaattggttctgctgctaatatgactgtcaagtcgatccctcaccttattattgaagtaatcttaattataatggattttgggcaaataaaaaagcatttaccccgatataatgggaaaatactttaaatttcttatttttcggctttttcagcacgtggccatactggacgaccccaatattggaataaatcagtctgaatccgaccattataaagtttacgacgttttgttgcgcgttggccgaaagattcttggaattgtaaatcacttgttaaaatgtatttactccaagttttcaatgaacgataagtatcgcccatttctttatacaatacccgcgcttgagtttgatcactcaaacgtttaccgtatggtgggttagcaatgatgaccccgttcgttaaatccgttttaaaatctttaacagctaattgtttgaactggatatcatgtaagacacccgcttcattagcattcaacttagcgatatcaaccatattttggtcaatatcataaccgaagatttcaagttcttgatctggtttttcttgtgctttagcatcagccttcgcatcagctaaaacagtggcgtcaatccagtcaaagtcttcaaaggcaaacttacggtgcataccaggcgcgatattacgaccaattaaggccgcttcaatcgcaattgttcctgaaccggtcgttggatcaacaaacggcatatctggttgccaacgactaaggagaattaatgaggccgcgaagttttccttcaatggcgcttcccctttttcaagacggtaaccacgtttgaacaaactaggaccagttgtatctaaactaattgtcaccatgtcttttaagatgctgacttctagcggatagacagaaccagtttcagctaaacgcgtccgacggtgataaacggtactcaacttatcaacaatcgcttttttagtgatggcttggacatctggttcactatggagtgttgaacgcacagaacgaccagctactgggaaagcagcatctagtggtaaatattgatcccatggcaaagctttcacttgttcaaaaaggtcatcaaatgtctttgcttcgaattgaccgatggcaatcttcacacgatcggcactgcgtaaccaaaggttagttttggcgatatctgccaagtcaccttcgaaataaacccgaccgttatctgaacgcgtttcgtagcctaaattctgtagttctttagccgtaatggattcgataccacttgccattgtagcgtatagttggtaagtcattttttaaagatccccttaggaaattattttttaaataaaaagagcttgggcaaaagcccaagccacctgtttgtaaacctctataggccatgttttgttccagaacttccccaggaagaaagctccttcagtaatcatctatctgttctttcgaactctcatttttagttcatttccataaatgagacgcccctaccaaagtttgggttactcgctcgcggggtttacctcgttccatcgtttgggtttccccaaacgctccgtcactgtggcactatttaaggatattaacgcatgaccgaagttttagcgctttttccgccgttaccattaaggtaccctggcttattgggccaggcacgaacactacaagcatctcagcctgtgcgggcatggaccttcctcagcctactgatgtagaccgcgattactcaagatttacaaatgttaatcaatgtatattattatagtacatcttaagcgatttgtctaatcaaattgtgaatgattttgaactcttgtttgagcggcaccattttggtcacttaacttagcaccaaatacgtgacgttcaagatttgataaacgtttcaaaatatcatagttagttgctgctgaagcctgttgtggcttgacttctttaacactgtcagaagcacttagttgacgattaagttcttcaaccttgttaaataagcgggtattatcggccgttaaacgatcgatattttcttgataagtttggtaatctttaatcactaaatctaaataaccgtcgacttcttcaggatcatagccgcgcatctttgacttaaattcttttttcaaaatttcagttgggtttaattcgatttctaattgattatccattttgacacctcatttataataaatataccataaatcccattatagcaaagttattaaagttattaaagaattaaaagccctaaaaagcttgattctctaactccgccaactcgtttgctaaatcttgtagttcaaaaaaatcgacctgattattgggatactcatgttgttcttgataggtctcaattgctttagcatcgtattctggtttaccaggcgcttcacgatcatagtacaataatgcaccatctgtatgcgtcagcataaattgctgatattggcgcaactgttggggcccagaatacggggctttaatgacgggttcacaaaagtcgacctgggcttttaacgtcatcaacgtaccctgattttgttcgttccactgttgaccaaaatcgctaaacggtagcatcatcgcaaccttcaattcaggataatctattttaagttcctgtgcaacttgaatcccccactgctcaatacccatctgacccccggtgataagccattctaagccatcatcgaggtaattattaagttgcttttttaaagaatatttaataactttaagtttctcatcggaatcgccaaaaacgccgagttcatagcttcgataaccggttaaccataatcgcttcaattgtcagtcctccacctaatgattttaaatttgagtgaatattgctataatagtttcacaggagtgtgattcttgatggcctttcattatccaaacggacagccctactcaaatcatgaaacaaaacagcctaaaaagcaagggcgacatactagtccaaccaccttatatggtaaacgcggtatgtcattagaagaagagatcaacgatagtaatcaatattatcgactacgtgatgctgcggttatctataagaaacccacccctattcagatcgttaaggttgattatccagcacgtagtcaagctgttattaaggaagcctactttaagcaagcttcaacaacggattataatggcatctatcaggggcactatgtggattttgaagcgaaggaaactaagaataaaacgtcatttccgttccaaaactttcaccaacatcaaattgatcattttagagcttgcttacaacaaggcggggtttgttttgtgattatgaagttcgtcccactgcaacgtttatttgtgtatccggcaagcttattgattacacaatgggacaatcaagcaactggtggtcggaagtcaattccactagcggcgatcgttgccgatgggtttgaaattcagtatcaattaaacccaagtattccctatttagaggccgtcgatcaattaatcgcacgccaccacaaaggagtttaaattaacatgtctgccaatcaaacaggtaacacacgtgtcacaagacaccagaaaccggccaaaaagcgtactaaatcgctatttggccgtattatcaaatgggggttattagccctcttagcgctaatcatcgcgggtattggcttatttgcgtattatgcaaaagatgccccggagattacacaagcgaaattacaaaacggtaatgcaagtgtgctctatgacagcaataacaaagattttaaacaattaggtgctgctaatcagacttatgctagcagcgatcaaatcccacaaacgttaaaagatgccgtggtttcaatcgaagatcggcgcttttataaggagaaatttgggattgatccagtccgaatcgcatcggcggcctttgctaacattactgggcactcttcgttaggcctacagggtgggagtactttaacgcaacaattaatcaagttatcggtcttttcaacaaaaaacagcgatcaaaccttcaaacgtaaagcacaagaagcttggttggccgttcaagttgaacgacaatattctaaggatcaaattttggaatattatatgaataaagtttacttgaataatggtgtttatggtatgcaaacagctgccaagtactattatgataagacgttaaaacaattgagtctcccacaattagcattgattgctggtatgccacagtcccctgctaattacgatccttatgcacatccggatcaagccaagacgcgtcgtgatttagtaatcgatgccttacaacggaacaataagatttctgaagcagaggcgactgaagctaaagctgttccgattaacactggtttagtcgcacagaaatctgaaaccaatgaatcaacgaacgctaaagcaactgatgcctatgttaaggaagttattacagacctcaagaaaaaaggctatgatccttataaagacggcttgaaagtttatacgaatatcgacatggatgcgcaaaagaagttatataacaccgttaatgacgatacaaccgttcaattccctgatgacaaaatgcaaacagccgtcactattactaaccctaacaacggtaagattgttgcgatgattggtggtcgcaaaactggtgatgtccaattgggctataaccgggcagtctcttccggacgtagtaatgggtcttctatgaaaccaatgatggactttgcaccagcgattgaatatcttaattattcaacggctcaaaaacttcaagatacagcttatatttatccaggtaccaacattcaactgcacgatttcgataaccgctacctgggtacaattacagcacgtaatgcgctagctaattctcgaaacgtacccgcaattcgcttattagaagatgtcggtatgacgcgtgcacgtaagtttgttaaaggcttagggattacgattcctgaagataccggtcttgcttatgggattggtgggaacgtttctaccttagaagaatcggctgcctatagcgctttcgctaatggcgggacttactacaaaccaacctacatcaataaagttgaaacggcagatggtgttacacataattacaattctgaaggctctgacgcgatgaaagactcaactgcctatatgatgactgatatgatgaaagacgtcatcaagaatggttctgggacgttagcacagatctcagggttacatcaagctggtaagaccgggacaaccgattattcgagtgaagaattagccaaatcaggactcagttcagaccttgcgaaagatagttggtttgccggttacacgaagcactactccattactgtttggacgggttacgacaagccactcgaaaatggtttaacgatggaggaacgaaacattgcggcctatatttaccgcgcaatgatggtttacctttcacaaaatgtttcaaatacggattggacaatgcctagttcagttcaagctaaaacgattgccggtgttagagagctcttcgttaaaggtacgaccgccgcaatttcagatgcttcaacgagctcctcatattcatcaacccatagtgtcatcgaaacaccaacaccatcgatttcggtacaaagctcaagtcaaagtgttccctcttctgaaagtagtgaatcagtaagtagtagctctgttgaatctagttcaagtgtgtcatcgacaccaagtgaatcatcttcaacagtaagttcttcttctgaagcccccgctagctcgtcaagtacacccgcaaccagtcaatcgacgagccaaccatcaatatcaacgcaaacaacatcacactaattaaaaatagcctgattgtcactctattaataagagcacagacaatcaggctatttttttattattaagacttggaaatagtgtttaaccgcgttcttgcagcattcgttgccctgccggacaaatacttaacaatgggcattgatcacacttagggttgcgtgctgtgcagacttggcgtccaaataaaattaatgtgtggtgcgcttgcacccattctttttgggggagcttggtttgaaagtcagtttcaatttggcgtacagaggcgttttcagcactaatcgttaagcgcttggcaattcgactaacatgcgtatcgacagcaaacgatggcacattaaacgcatcgcctaaaacaacattagcggtcttccgaccaacaccggctaattgctcgagttctgcgtgggtttgtgggacttcgccaccaaaatccgtgattaactgctgacaacaagtgcggatatgtttcgctttattgtgatataacccaattgaacgaatatcggcttcgattgcggttagatctgcggccgcaaaactggctggggttggaaaatgttcaaaaagttggggtgttactttattgactgatacatcggtcgcttgcgcacttaacatcaccgcaatcaataattgaaatggactgtccgcaattaaggccccctttgcatcgggaatcagctcgtacagttgtgtcatggcccatctggtttttgcttttgataacatgttcaactacctcccttatcagattaacgtcgtggatgcgccttttgatacgcttgtaaatcttccttagtctgaatattttgtttctgccaatttaataaaattttgtcgacatatttaagtgaataaacttggtttaagaccgcttcgcgaactgcgagctgaattagttcagctgaataatgatctaaatccaaccaatttgagataatttcagattcaagtggcgacaatgggcgcccaaaggtttgctcaatttggttaaaaacggacaggcgttgatttgtttcttgcgaatttaatgctgcctgattttgttggacagctaggacactgagcttggacaatgctggtgttagatcataatgatcaactggctggccttgttcattaaccgttgagttcaacgtgataattttctttttaagtaattgatggattaactcataaatttgcgttggcgccaatcccatccgttcaccaatcaccgctaagtctggaaaagtatccccttggctggcaaaatcactcagttgtaaataaacaaccagttcgtcagaagacattctgagcgtttggtagtgttgtaataataagcgcgacacgctaagctgaccgccctctataaatgccgttaattcgttcatatactagccttctttttgaaaaatgattacttctattgtaacgggttttgagaaaataaaaaagcatgtcggtcaataattgacgacatgcttttaaaatatacttttcaaaatttaatttatggtttgattctgttaatcattcgtgggaatggaatagcttcgcgtaaatgatcgatgccacaaatccatgtgattgcgcgttcaaggcctaaaccgaaaccagaatgtggcactgagccgtaacgacgtaaatctaggtaccattgatattcttcaatatctaagcccattgatttgatttcagcttctaatttatcgaagtcagtttcacgttcactaccaccgataatttcaccgtaaccttctggtgctaataaatcagcacataagtagacatcatcacgtgttggatgtggcttcatgtagaaaggtttgatagctttagggtagtttaaaatgaagacaggttgttcgaattgatcagataagtaagtttcatctggtgcaccgaaatcatcgccccatttaatatcgaagtcagctgcttgtaacatttcaacagccttatcatatgaaatacgtgggtatggtgtttgtgtgtacttcttcaattggtcaatatcacggtctaataattttaattcataggcacagtgatcgataacgttttgaacaaggtaagccacgtatttttcttggacttcaagactttcatcttgttccatgaaggccatttctggttcaatcatccagaattcagtcaaatgacgacgtgtttttgatttttcagcacggaaaacaggtccgaaggtaaagactttaccaaaggccattgcaccagcttctgcgtataattgaccactttgtgtcaaataagcatcgttgtcgaagtattcgatgtggaataattcagttgtgccttcaggtgcactacccgttaggattggtgggtccatcttcatgaagccttcttggttgaagaattcataagtagcacgaatgatttcatttctgatcttcatgattgcaaatgggcgttttgaacgtaaccataagtgacggtgatctaataagaattcgatcccatgttccttaggtgtaattgggtattcactactgtcaccaattaattcaatatttgagacttcaatttcgtaaccgaaatgtgaacgtgtatcttcatgaatcacacctgtaatccacatgcttgattcttgtttaacgtctttagccaattggaagacttcttcacttacttggctcttaacaacaaccccttggaaaaaggctgaaccatcgcgcaattgtaagaatgaaatcttaccgctagaacgcttatcggttaaccaaacgccgattttgacttcttcatcgacatggtctttagcgtcaataatactgatttttttaaccatatactctgtctccttatgctgacttaatttaacttaaacagttcaaaataactgataattattattatataacaaaacactgacgacaacagccctaattagcaaaactcctagatattttcaattaattgggtcgtattaccggtcttgaaatcaagcgttaaataacaaaggcggcccttgtcgctgcgataaacgacttcccaaacaggtttattcttataaaaaccaaagttaatattgaggaccttttgaggattcttagtggaccacgtctttttaagggcttcgtttttagtcatcccttttgattgacgataaacggtcacatgattgcccttttcgttaattaatacatagataccatttttatttttatcttgaccactgactgtataatacgtgccattgcgatggtacgtgtaaaaaccatctggattttctagcttagcgtatttcttagcaatcttggtcgccttcgcttctgcggtgacttcgggtgagcgcgcttggtggtagacgaaaaacatcgtgcccatcaagactactaataaaaatacccatatccatctcttatatttacgcacggcgcattctctccttgctacattgaatagctttattatagcaaaaaacaagttttgctacggttaaatcccagaacttagtcagaatttaaccaaaataaatcactgagctctctaattgtctgcacaggtgccgccttttgaggcagactcgccggtaaagcacggcgcatttgttgaccatattgcgtcgtcaacaaccgtggatccaggcaaatgaatagaccatggtcatttggcgttcgaattaagcggccaaatgactgccgcaaccggattgttgccttaggtagtgcttcggctttaaacggattaatcccttgggcagctaattgtgcataacggacacgcgtctgtaatgcattgggtgcatcaaatggtaattgaaccaaaataaccatttcaagggcggcctcaggaaaatcaacccctgagacaaaactactagttgctagtaagaccgaatcgtgtcctaacatgaaccgtttagtaattttttcggcactgccggtaatgccttgagccaacacttcacgatcgagtgataacccagcacgacctaatgcgtaataaacttgttctaatgtttgattggcattaaacaaaatgagcgtttgatgcggattattggcaattaaagtcatcacttgcgctgctacctgttgatggtaatcgcttggcgttagttctttttgaaccgggccatcctctgcgatataaaaacgggcttgttgtttaaagcggaacggacttcttaacttcttagtttgtaaggcttgctcttcagtaaaaccaaattcccgtttgaggtagtcgaaatggccattaaccgctagggttgcacccgttaacgtaacgggttcaaagtggcttaacacttgttgcatttggggaccggccgataacaattgccaatgcaatttaaattgtggtaactggctcggttgactaggtcgtgtaatttgaatcgctaatgcatggcgttcctgcggtttcgtcgcaatgaatagttgttcaaaccgttgataatgatcaacatctgctaataagagattgagttcattttcaaaagattgccagattgctaaatcagattcggtataccgtgctaattgatcctctagagcatagcgtaacgccaagaaatgatcttgaatcgtcaacaattctcgatttaactggccaaactcgcgctgactagcattaacgaattgaatgacttcgtctggatttaaataccgttcactaaaagtttgtccatctgttggttcatctggttcaaactgctccgttaaataggtttctaaatgcgctaaagtccgtgttaacttacccaatgttttatgcaataacttcaatgagcgattctgcggtgtttccgctgggaatagtcgtactaaattattggtttgggcccctgttgtatattggagtcctttttgagcccaaaattgccaactggataacgaccaagtctcttgtgaaatggtctgcacattaaacaccatgttttgagcttcatctaagaccaagtaaggttttggtccccaaatttgttgttcatccgcgtgacttgctaaataagcatgattagtgaccaataattcggcttgtcgctgccggtgcgtcaaccgtctcaggaagtcctcatgataaaacggtgcttgggggttcaaactagccagccctctatgttgaatgctgacaaaaaatggggttttgtaactggttaaattgagttcatctaaatcaccagtcgtcgtttgcgttaaccaaactaaaattttcatctgcaacaagcgaatcatccgatttttatgcggtagccgcaatgataattcaaagcgatgcaaatcaatatagtgactcgcacttttgacaaccgccgcattgatttgccgaccgaccaagcgctctaatagcggtttagcctgtgttaggatttgttcttgcaatagcgtcgttgatgtcgcaaccactaacttatgatcacgtgacattcggtaactatacggtagtaagtaaccaatcgtcttccctaacccggttgctgcttcaattaataatggctccggtgtttcagactcgaaattatcgtggattaaatccatcatcgtcgcctgtgccttacgccatttcaaatgtggttttaaaagacgctttttttcagcttcagttacgggatactgagccgcatagctcgaaccggggtagatttcaaaatcaaccggtgcgggtttacggagtgcaatctcctcttgaattaacaattcgttgggaagtggttgcgatttttcgcgcatctgctgagcagtatcggtgaaaaaatcacctgtttgtcgcaataagccctcaccaagttcactcaaacgattaagggtgaccgatggcaaagcctgtaagcgggcgcttaacttcaagaaaagtttagccgttaccagcgcatcactgtcggcttgatgaggattatcgtgttcaatctctagcagttgggttaaatcctgtagtcgatagctaggcgcctcgggcaagatgatttgcgccaattcaaccgtatcgattcctgctaaatctaatggttgtaagccgacgcgcgttaattcgccatttaagaaaggtaaatcaaaattaatattatgggccacaaaaacagtgccagataaaatttcaactaatgtgggcgctaaatcttcaaagattggggctaactctaactgatcagccgtaatatgcgtcaaatgttgaattttagttggtacgtcgcgtagtggattcacatcttgtgaaatggtctgaataattttgccgttttgaacaagggcacaaccaaattgaatgatgcggtccccatctttaatgttcgttcccgttgtctccaaatcaacaacggcataaatagtctctcggttcatgctgtcaccaatactttactcataattaatgttaatcatactatgaatggcgctgataaaccagtctagttaatctcaaccaactcgccaattgacaataaatagagatatttatgggtcactggcttttgggcaatctgatttaaagcggcgctatagaggttaatctggccagcatagcggtttttaacccgttcaatcgccgcttcttggtcactggggtcaataaagtcggttttgtaatcaaataaataacaaccgtcgtcagtcaataaataaccatccataatcccatggattaggacgtggtcgtcatctgtgggacgaatgccttcaaaaatcgtttctgctggtaataacaacgaaaatggcacttcccgcttaaccgcttctggatgggctaataattgctgtcccaagtcactttcaaagaaggttaataggtgattaagattaatcttagccgcaacattggcgcttaaactattctgtaaaacaagtcgatcgacaagaccttgcaaactcgctagcgttactggttgcgttaaatcaatttcttgcaagaccaaatgcgttgcggtccccacttctgctgccgttggttgttgaacggtttgtaagaactgtggttgcgctaagctatccgttacgtagcgatttgcttggcgcggttgttcagccgctaggtctaattgtcccaatccggtattatcagggtcttcaaaaaggcgtttgacttccgaaacagattgataagccgtcgtttgggtcgcaacattagcgggatacttaaaggttaattgctcagcaatcgctgttgctatcccactgtttaaatcaattgtttgaagtgccttttgctgttgttgcccccagtcctgatcgttatgcaggctacctggtatttcaccaagtaaggcttcattagtcataatcaacttaaactcggtttgatcaccacttaaagccagtagtggctcataatcagtgatccaatctttagcttgtggatggcgaattaagctaagacctatccagtccagtaaacttgcggcatcgttgcgaacaccatcatctaatatttggtgggtactattttgccctttttgccattgcttcatcaattgggcctggttatcacaatggccaacgatgattaaccattgttccgcacgtgtcaaagcaacgtatagttttcgcatttcttctgctcgtaatttttttcgtttctgggcggtaatcgctaattctggcagtgttggtaccttcaaccgcttttggctatctaaataaacgacccctaaaccaccatgattatccaaaacatatgagcgttgtaaatcctgttggttaaagcggcgactcgtatcgattaaaaagacgactggaaattcaagtcccttactcccgtgaatggtcataacagagatggcgtcttgattttctaagctcgttggttgtgctaaatccttatcttgtttttgaagacgttcgataaactgaatgaactggaagagtcctttaaaaccattttcttcatacgccgtggcacgttcataaagcgcgtgtaaattagcttgacgttgacgtccagctggcatccccccgacataatctaaaaagccagtttcttggtagatcgtccaaattaagtccacaatcggttgttgacgagcgattgttctaaacgacgtcaataaagccatgaagtgcgtcagcttctgcatcacttgttggcctaagtggccgactttctgctcattatattggtcaataaagttaaagaccgcttgataataatcatccgtcttatcgttaatccgaattaatgccaattcattttcgtttaacccgacaattggtgagcgtaaaacactgaccagtggaatatcttggttaggattatcaatcacctgaagtagggctaacataatttggacttcagtcgtttggaaataattttgcgcatccttaatcacaaccggcaagccgaagcgtttaaagtaatccaggataaacaaattattaccgcgggttggggctagtaaaacgatgtcccgatattcaatcggccgcattttttcgagtttcttatcccaaatctgttccccattattcatcatggcttgaatccgtttagcgaccgccacgacttggccctcactcttatctaattgcgggttggcaactgcctcttccggcttagtttcataaagcaagagttcggttggcgcggttgggtgctggtcaggataataacgagcaccatattgtaaggcggcattttcgtcatagtctaattcaccaagattttcgtccattaattgtttaaaaatcagattggtaaagtcatcgatattgcggcgcgaacggaagttttcagctaagatgattcgttcactatcacgttcagcttccgtgacaccaaattcgttatacttattcttaaataagcttggatcggccaatcggaaagcataaattgactgcttaacatccccgaccatgaagagattgcgtggatgatcagaagtgaccttttggataatcgtttcttggagcggattggtatcttggtattcatcaactagcacttcgctaaatttttgttggtaaaaggcccttgccggcgaatcctctaccgataaaattgtcagacaaagttgttctaaatcactaaagtccaataaatggcgccgttctttttcagcttgaaaggcttctctaaaagttaacgtgacacttactaatttttgaaccaattggccagcttgacgttgaatattagcggtggttgcttcatcaaacacaaaataggtgtccagtaacgtctgaattttctttttgacgtcatctaaatcggctttcaaccggtccttattaatttgttcgtcgggttctaatttcttagtccgtttagcgggccccagctgtgcatctgttagttgttggcgccatgcttgccaattcaacgtttttgcatctgcgttaatttgtgttaaggctgcttgcgtagttgcaatttgaggggcataaatcattagattttcgcttgttttactgagctgttcagcttcttgtaaggcttccaagcattcggtgatggtttgctgtaaaatgggtaatattttttcttggaaataatcactggcagtcaaaccagcttcatcaacagcataactcttaggtagtttatttaaccatttaaccgggttgggattggcgtttgcaaaatcgagcaactcaaaaacaatgtcggtcaggccgtcatcgttacgatcattcgagaaattttgggctaattcgtagaataatgtatcttgttcattttctttgacatattcgtgattgtagaaggcctctctcacccgttgccatacttgatccgctaataggagtcgttctgcggtatcactcaataagcggaatacgggatcacgatcaatgacataataaaattgtttaatgacctttaaacaaaaggcatgcagtgtactgatttgtgcggtaggcacgagacttaattgttgccgtaagcgctgtttaacggctggctctgtcgctttctcgctagcatcgcgtagagctgcttgaatccgttggcgcatttcagtagcagcggcctccgtaaaggtcacaacaagtaaagtatcgacatcggtcccttttaagattttctggatgacccgtgcaacaagaacggatgtcttccctgaaccagctgatgcggatactaaaatatcgtggccatcatgatcgacagcggcttgctgtgaaggtgtaaattgggggttactcaagattgccatctccttttttactcattaagcgttcgaggactgctttttcgtctaatgcttctagttgacgataattattttcaggtaacatcgcatcgaattggaaaattgacttaaatggtgacaacgttagggcattcgttcgatccggacgcataatcggattcaatgctgtgtccccagcgaaaatcgcctggcccgcttctttgattaagtcttcgttatgtgccatcaataaatcaagttgatcaagtgtgacgagttgtttagagctaaacttaccgctctttaacttactgaaggcaaagagtggcgattggccgttgacaagcgttgtatcgagattttcgagtaattcctcatcattgacgatgagcccgttgtatttaaattgatctaataacatttgatcgaactcgcctttttggagttgacccatttttttcttggttaattgtttgagggtcaatgtcggattcttcagatgtaagtaaaaggcaccggcaggtttcaccgcactattcgctggtaaaatggcctgttgatcttgcaagaccgtttcgagataggtcaacatctgtaaggccaaaccatagtaagcatcccggaaattaaaactgtgctgactagatttataatcaacaattcctaagtagggttggttattgatggtcaattggtcgatccggtcaatctttccccgaacctttacttcacggtgatcgtctaacatgaagtttaacccttggagccctttttctgcgccaacttgaccaaataagacttcggtcgctaatggccgtaagttggttgagaggctctgattgcgaagtgctaagctgacgcgtttgacagtttgcatcaattgttggcgaatatagcccatgcgcgccgtcttgttcaaaatcttaaactcgggttgttcataggtcttagccaagacttcactgacaagcttatcaatttgctgatcatccaattctgggagtgcaatttgttggccttgaatcagtttaataaagcgatccatcacttcgtggtaaaagttccccgtattagccggtgttaattcaaaaacaggccgttcttgtaattttaaaccgtatttcaagaaataagcgtactgattttgatagaactcttctagttttgaaattgacgtatgaatttcattgccatataaaccagtgacaatttcaggtgttaggcgctctggttcattgcggtaattaagactttggaataattgtgttgttaagaactgactttgcggtgcttgttgcaagagtcgatacgtcgttaaccactgttctggaatcaacgtctgattttcttgcgcttgtcgactgacttgaatgagatcacttaacaagctgcgccatgaaccttgaggtgtctctgtgctttgtaatgattgttcagccgcaattttttgaattgttaaatcaaaatgatttctaatacgttcaacgtagggagaaattttgaaggctgttccctcgccatttcctagtggatacgtaaaataaaccgttgtttgactacttaaaaaagcgagatagttcaagtacggctcagcattcattttgccgacgctagactcgtttaataacggcgtaacttggccctcattatccaataagcgttggcgatcttgatcggttaataatgccgtattctcaatctgatctggcatgacttgatcggtcgaaccaatcataaaggtaatctggcgtttcttcgtctgaaccatccccgattcagagaggacaacttgatcaagggttgagggaatttgcgcatattgggctgccgcaaaaccggccgaaagcagctgtttgaattcgtttagttgttcagtattatcttcttcaaatgacacatcccctaacaaggtgacgtattcatcaagcatttgcataaaggtcgaccatgtttgttctggttgaccagcttgagccacttgattagcagctaatgcttgatctcgccaatgcaataattgccgatcaacaccatgatcaattaaaaattgatagagtacttggaccacttgccgaccagttttggctgctttcagtgcacgataaaatggcggtaaagttgcttgtacgtagcgccgaattccattaatgcgttccgttaaggcttcatcctgggtcgtccgcgtgccttcttgataagaaccgaaacgatagaattgccaatcaaaatcatttaaccaatccttgccttcgtagccattttttaaaatcaagttttcgcagagatctaaatcagctctaaattcggcaatcgacatgcctttaggaatcaacaattcagtttttaataatgccatgacatcttcgtaccggtaaaaatgaaggttaacgtccaataacttctccaatagtgatactaagggatgagccgccattgtttgtggtaaatcacagaaatacggaatctcgtattccgttaaaatcggcgcaatcattgtttgatatggtgctaagtgacgcgtcaagattaagaaatcccggtagcgataatggccagtttgcactaggcgccggatttcacgggcgacataacgtagttcggcgtaacgattttcagccgctacaacatgtaaatgatcagcaaccggcactgggcttagttttcgattacctgggctttcagaactaacccagaattgatcaagtgctgccaaagctggtgttaagcgctgactgtctgccatctggtccatcatgactggtacgtgattcaggcgtgcttgttgatataaattatagtaggtccgaccggcttgaaagaaaaaattcaaaccatcgggttgttgattagggtaagctctgtctaagataaatccgatttgtacctctgattgttgcatcaaagtggttaataatgcttgttcttgcgctgtaaattgtgcaaagccttccacgtagaaatggcaatctgttagcgtttgttgctgcaaaaagagggtcaaagcatcgattagggctgtgttttcaataaatcgtttttgcatggctgcttcaaaagcggtcgcaataatggttaggtcatgtagtttttttgcgagttcgacttgttgatcaccgagattttcagccatcgcagttaaatctgccggtgtgatacaaccaatcttaagttcaagtaattgttttgttaattgggccacaaagccggtatgtctgacctcaccacggaataattgcagttgttcttgatgttcctgcaataaccgaaaaaccaacatatttaaaccggccgtcgagatacgcggaatttggtaatacggcgtatttttcataaaataccacgctaatcgcgtcaatgaaaaaacttgaatttgagaagcggcgacgtaatcattttcatctgacttaagtgcttctaaaatagaaacttctgattcgaatttaatatggttcggcactaaatagaaatagcgttcttgcggtttttcttggaaagtagccttcaagttagtgacgagcgcttggtggtgatcataacttgcggttcctagaataaattttaagctcattattaccactcctttgggctaattttaccataaaacaaccctattttatgctgtgatttattgtgacaacaacctataaaaatctttaaagttaacaattaagatggctatttaaagcatcgttctggtaaaatgatagcttcgaggtcaatcattactgactactagtgtttcaaatagttttcactatttatagactgtttgtggcagtcacttttaaattgcagtatagtagtaacagtatgattaagttcagaaattgatgattaagggtgatacgatgcaaacgagtgtgggaaacagtcacgctaagattattttgattggagagcacgctgtcgtgtacgggcaacccgcgattgcactccctatttttgcagtgcagacaactgttcgcgtgacggcacaaccgacactaagcgaacccttgattaatagcccctattacagtggccttttaagccaagccattggtcagatgcaaggcattcgccgactaatcgaacagctctggcaacaattagacgatcaacaaaccgcatttgaactgacaattgaaagtgaattgccagccgaacgtgggatgggctcttctgcagcgaccgccattgcgattattcgcgccctctttactttttatcatcaagaattaaaccaacgtgacttacttaagctagcagcactttcagaaaatatgattcacggtaatccaagtggcattgatgcagccactacgggtgcaacgaccccactttggtttgttaagggccaaccactacagccattacccatcgacctccaagggtacttggtgattgctgatagtggtcaaaaggggcaaactggtcccgccgttaaaagcgttcaaaatcaaatgatgtccaatcctgaacgcactcagccactcattactcacattggtgaattgagtcaagccgtcgcaaccaatatcgcgcaaaatcagttaacagcactgggccagaatcttagcttagcgcaagatgatttacgagccttaggggtcagcaattcacgtatcgatgctttaatcgaaactgccaatcaagccggtagcttggggactaaattgaccggtggcggacgtggcggttgcattattgcactggctaaaacacaaacgaatgctgaacagcttgcacaacgattacgtcaagctggcgcaattaagacttggattcaaccattacacgcactacacactaattaaacaacaattgggagttatcactatgggacaatcagccacagcgagagcgcacactaatattgcgctcattaaatattggggaaaaaaagacgccaacttgattattccgcaaaatagcagtttatcattgacgttagatcatttttatacagatacgactgtcacgttttcagaaacattgacgcgtgatcagattatttttaatggccaagaagccgacgaacaaacacaaactaaaatgagtcagtttttagacctgattcgccaacaagcgggtcggtcaacttttgctagtgttgaaaccactaatcacgtgccaaatgccgctggattagcttcttcagcttctggctatgctgctttagcggcagctggtagtcgtgcggctggtttggatttaaaccgacgtgacttatctagacttgcacggcggggttcaggctctgcgacgcgttcaatttatggcgggtttgtcgaatggcaacggggcaggaatgatcaagattcatacgcgattcccgttcaagaagaaattgattgggacattcaaatgattgcgattgttttaaacgatcgtaaaaaacgggttgccagtcgagccggtatggcaagcgttgtggcaacttcaccttattatcccagttgggtcgaaacagctcaagcggacttacctaagatgaaggacgcaatcattaagaaagatataaatttagtgggacaactcgctgaaaagagtgcgatgcagatgcatgcaacgacgcttagtgccgtcccacctttcacctatttcgaacctgaaaccctccaagcaatagaagtcgttgagcgcttgcgccaacaaggggtttcttgctattatactatggatgcaggtccaaacgtgaaagtgatttgtacgagtcgcgaaacgccacagatcttggcagctcttgcgccctactttacagctgagcaattattggttgcaaaaccaggaccgggcgtgacctctctgtgagcataatgaataagttaaatgtgaaaggttctgatggtttgataacggctaaagcacccgggaagctgtatattgctggcgaatacgcagtagtagaaactggttttccggctattattgtggctttgaatcaatttgtaacggtatcaattgaagagagtcgagaatatggcagtattgtttcaaaacaataccaagaaaattctttatattggcaacgacaaggtgatgaaatggtttttgataaccgtgataatccctttcattatattttatccgccattaaattaacggaacaatatgcccgccaagcgggtaagaaattaagtatctatcatctacgggttaacagtgacttagactcggccgatggtaagaaatatggtcttggtagttcggcagctgtcactgtagcgacagtcaaagcgctctgtgctttttataaactcgaactaactaacgaccaactctataaactcgctgcgattgcccatcttgatgtacaaggtaacggttctttaggggatattgcagccagcgtttatggtggttggattgcctatcgctcttttgacaagcaatggttggcagagactagaccaacgatgacgttgaacgaattattggcgattccttggccgtcattatcaatcgagttattgacaccacctgctgaattatcactcttgattggttggacgggttcccccgcttcaacttctcatttggttgataaaatcgcactggcaaaaacggaacgccaagctgactatcaaaacttcttaaaggctagcaaagcctgcctagaagacatggttgcaggattccgaactaataatttacaacaaattcaagctgaattgcgccacaatcgcgcattattacaagaactagccgattttagtcacgtcgcaattgaaacccctgtactccagaaaatgggcaccctcgccgaagaagccggtggggccgctaaaacatctggtgctggcggtggtgattgcgggattgtgattattgatcgtgcaatcgatacaacgtcactctttgaaaaatggcgtgataatcaaatcgaacggttaaaccttgccgttcaccttgtagattaggagttgactaacatggtgagaccaaaacaatctatccaatcgcatcgtaaagatgaacatgtctttttagcagaaaaatttcatcaagatgatcgtcaaaacgattttgacggccttcgttttatccatcaaagtttacccgaactagcgattgccgatgtcgatattagtacgcaatttgctggaaccacttggcaaagtcccttctacattaacgggatgactggtgggagccaacaaactaaaaagctaaatgcgcaattggcacaggtggcacagattgctggcttaccaatggccaccggttcacagtccgtggcgattaaagatccgacactcgttgatacgtttagtgtgattcgcgaatttaacccggcgggcttcatcctcgctaatatcggtgctggtaatgacctatcggttgcgcaaaaagcggtagcgatgacccaagccaatgcccttgaaatccacgtcaatacagcgcaagaagtcgtgatgccagaaggtgatcgtgaattctactggctcgatcagattggcgaaatcgtcgccaacttagacgtccccgtgattgttaaggaagttggttttgggatgagcgccgagacgattgctaaattgcaaagtgtcggcgttaccaatattgatgtttccggtaaaggtggcaccaacttcgtcacaattgaaaatgaacgccgccgagataaagcttacgactacctcagtgattggggccaatcaacagttgaatcactttttgaatcacaggcctttcaaactgaattaacaattttggcgtctggtgggattcgtaacccgcttgatatcgtcaaagcattacgccttggcgcttctgccgttgggatttcaggtcaaattttacacatgctgatcaaaacgggtcctactgaaactgctgaacaattattagcctggcaagctcaaattcagtcaatcatggcgatattgggtgcaagaaacctaacagcacttcaatcagcacccatgatcttaagccctaatttacgacattatttaaacgaacgacatttatcactttaaatacaaaaaaagcaagtctagtatcttttagtttaaagactaataagtattcttttttgaacgttgttgcttgtctatttaccgaatcgttctcaatattttcagctgtttgtgctgtttgtgctgtttgtgctgtttgttttaaaataacttgattggaattatttttttgatcaaggatagccgtatacgctgattttttgtttaattgattactagttgtgcgatcaaatgcggccccctctggtatagttaaccctaaatcacgttgcgcttttgactgatcgctcaccctaattacaatttgtttttcattagataattcctgatccgatgttaatgcaagatctgaatctactttgatactactttcagcaagactcgttccggtagtaacaatcagttgtatacccattactgctagtaacaccaaactgaacattatatttcgtctatttaaagtcacattttacccctcccgagaaatcattgacgatgataaaaaactaaattgactacgtgtccttttggataatcgaatcaataatcaggtatcgattaactacatttatacttacggcagacaaataataatatattaaccaccaatcgaaaaaccgataaataccacctttaggtggcacaacagagagtgtcataactcctgagttatgaacttattggtatgataaagtgctaaaactctactgccacgaacctatagaaatccttcaagaggttgatattagaaaataaatcaaaatgaattgataactcaaccgagtgtgtattattagtaaataatatttacaaagctagattaaataaaataaaaaaggagtgccgagtgataactactcggcactccttttttattcttgtctaatgttctttatcaattaattattgcattattattcttaatatagacaatctaggaattttttttatttctattgagaaattattagttgtagttaaccgttttttagtattttttgagcaagcactttcatttgacgattctcggttgaaagtcctatagtgactaggtaagttgcgcacaattattttctagtgtgttcctagtttttaaactattcttaggaggtcaaatattatgacaaatcaactaacgactaacgaagggcaaccatgggcggacaatcaacattcacaaactgccggccaacgcggtcccgtcttaatccaagattatcaattactcgaaaaactcgcccattttaaccgcgaacgcattcctgaacgagtggttcacgccaaaggtgctggcgctaaaggttatttcaaggtcacaaaagacatgagcgcctacaccaaagctgctgtcttcagtggcgtcggcaaaaaaacaccgcttatcactcgtttttctcaagtcgctggtgaagctggctatcccgatacataccgcgatgttcgtggtttcgccgttaaattctacacggaagaaggcaattacgatattgttggcaataatacgccggtcttcttcgtcaatgatccactaaaattccccgatttcattcattcacaaaaacgtgatcctcggacacatgcccgtagccaagatatgcaatgggatttctggtccctttcacccgaatctgtccatcaagttacgattctcatgagtgaccgcgggattcctgccagttaccgaatgatgcacggctttggtagccacaccttcaaatgggtcaacgcacaaggtgaacaattctgggttaaatatcatttcaaaacgaaccaaggcgttcataatctcagcaacgaactcgccgatgaactcgctggtaaggatactgattaccttcaaaacgatttattcgacgcaattgaaacgggcgattatcccagttggactgtcgccgtccaactcgtcccttatgaagatggtttgaattatccccaagatatttttgatgttaccaaggttatttcacaaaaggattatccattaatcgaaatcggtcaaatggtcctcgatgaaaatccaacgaataacttcgaagatatcgaagaattggccttctcaccagctaacttagtccctggaattgaagcatcaccggacaaattactccaaggtcgactatttggttataaggatgcggaacgttaccgacttggtgccaactacgaacaactgccaatcaaccgaccaaaagtccctgttcataattacgaacgtgacggtgccatggcccaaaaccaagaaacgggcgttaactacgaaccaaatagtcaagatggacccactgaagtcccagcagctaagattcatagtgatcaattctctggtacaactggcaacttctctaccgatcccgattattactcagcagctggcaaactttatcggctactatccgctgatgaacaaacccgtttaatcgaaaatattcgcatgaatcttggtcaagtaactaaaccagaaattcaaattcgcgaagttaaacaattttaccaagctgatccagaatacggtcgacgcgtcgcaaccgcattaaatttagatttagcacagtttgaataacgacgagcacaaaaaaataggtggtcccattgaggaccacctattttttattcgttatctttattatcttttttacctgcttcttgttttgctgcccattctttcttagtcaacaagtcagaaacattcattttaatttttgtaacatttaaaccggtcatcttatgcacagacttggcaatttgatcggttgtttgttcaaaaatatctggggctgatttaccgtattccaaaatggcatctaattcgattgtcacttcttgatcgtcaatatctgcatcaacacctttagttggatctgcttcatctctgaaacgatctgctaattgactcatcataccacctgataattctaagacaccatcgatatcatgaacagtttgaccggcaattttttcaatcacaccgtctgaaaagtttaattctttttcaatttgtgcgttatgatctggtgtttccttattaggtttgtccatcatcttatccattggtttgtttggcttatccattattttaatccccttttcttaattttttattgaactcttttgtcgtcgttatcgctctttttagcgttgctaccttgttgttgccattctttcttagtcataacgtcactaacatgactattgacctcaacaacactcaatcccgtcattgattcaacagcttcggtgacagccgacgttaagcgttcaaatacgtcgcgcgcgttgcgaccatattccaaaataatagtcatatcaatcgccacttgtttttcgccgacttcaacactgatgcctttggtaggatcgctatcagttctgaatcgatcagcgatatcgctgaaaaagttgccattcattgatagtaacccatcaatattttgtgctgttttaccagcaatttttgcaatgacagcatcttcgaacgttaacttgctgtttgctaatacgtcatctaaatgtgcttgttctaccattttgctgcacctccattatttatcttgtcttaatacgcggttgacttgtgctctaaaaccttctaaatcatctttggatcccgttaaacttgctgcaatgtagccaatcagaccggcaatcaaaattaaaattaggctcacaaatccaaagccaatccatattgccgctaatgcagcgcctgcaataaagccccaataagaacgtttcatttgtttcacctcaaatcactttactttgcgtccgaccttgatcatgaacaagtggcgcaagcttaacatttactgatttaattggcatgtcaaagacctctttgagtgcctgttgtgctgtttccttcaccgctctggcttgctgatcaatgtcccgattatcaagcacttttgcttgaatatctgcactaacccttggttgtcgacctttaaaaacggtctggacataaacatccttcaaacggtgtttttcaattattgcctgggaaattgttttttcaaccgctttacgcgataaagctaattccccttgattggttttaataatcatctgacgtttctttggcaaactaaaaattgctagtaataataaataaagaaaaaccagaccactaataacgcccaatcccagccctatattgctaatccactcttctgacagccagttaaagttaatggcttgttgatctgctagtcctagcggataaacgagcaaaatgaaccatgctacctgacataatcccagaaaactggctaagccgattaccgtttttgtcaatttgttcatggtatctgctcctttactttaggatttcttacgtgaaaatagcattgatactaagaatacgatgattacggcacctaagattgaaggtactagcgccatacctgctagttggggtccccaactaccaaataatgattgacctaaccaggcaccgacaaggccccctacaatattgccaatccaaccagcgggtaaatcacgacttgtaatagcccccgcaataataccaattaaagccccaataattaaaacccataaccaatgtaacataataatcatccttccatactatttattataatcgatattccatcgactacttgtactacctaagtgtaacaagttcaacattgttttgtaaaagtatacacttattcattttataaataatataagcaaataaattgacaatttagttgattgattcgccaccggtcaccccgtatatctgtccggtaatgtagctagcagcattgctagctaaaaatacatagactggagcgacttcaactggctggcctgctctttttaaaagtgtattctgtccaaattttggtaatgcgccctctaactggccttgcgctaattgaagtggcgtccagattgggcccggcgcgacaccattaacgcgaatccctttatctgctaattgttgggcgagattaatcgtaaaattcctaatagcggctttagttgcggcatagtctaagagttgtgaacttggattgaatccttggatcgaggtggttgtcagaatactaccaccagctgggatatgggcaatcgccgctttagcaatgccatacattgccaccacgttaatttcaaaactatcccgtacttgttggatgggtaagtcttcaagcgttggatgggcaatctgttgggcggcattcaacacaactgtatctaaaccacctaattgtgccactgcttgtgctaccacttgttgcggtgcttcttgcattttaaaatcagccgggattaaaactgccttacgaccagctgattcaattaaccccgcgacttcattagcatcactttcttcaccaggtaaatactgtaaagcaatatccgcaccttcacgtgaaaatgcaattgctactgcgcggccaattcctgaatcgccacctgtaatcaggactttgcgattcatcaattgctcacgcccttgataatctgcctcaccgcaatcgggtttcggccgcattttgccttgtagtgccggagctggttgttcttgctcctcaaatccggatactttatataactcacgtgggtctttcaaatctgctttgaccattaatatcacctttcctgacttaatttagataggttgctcttaactgattaatatcacttttacttaattttaaagcggtctgtaaataattctgcgtagaaccccaattttgcttaatcgtagttgttgcggtgtctaaataagcggattgcacactcattaaagcgtgcgtactttttataaagccactggatgcgtgcttagccgctaatcgtgacatgcgttgggcaatatattgttgcgaggcagtatttgtcagtaaatagtcttggcgaataacaggttcaggaacgtttagcgcattcaaaagataatatgcagccatccccgttcgatctttaccacccgtacaatgaaacagcgttgcctgattatccgcagactgttggagtaatatttcaaaaaattgacgatacatcttaatcgagtgttcatcttgaactaattcttgatagaccttttgcatttgcatttggccaccaagtggattgtttgtatagcgctgatagagttccgcctcagttgttgtactttcggtttggtcttctttgaaaatagggacagatttatatttagcactaactggtactttatccggtgcttgttgtcgctcatctttggagcgtaaatcaatatccactgagacgttataactgtttaaaagcgctagatccttgggactaagatcagctaaattagctgttcgaagtaggcgttttgtttttagcgttttgccgtctaatgtttggtaaccccccaattctctgaagttatgcccgttttcaatcggtaaaattctcgaaaccatctactcgtcctctctgaataatcgctattactatcaactttatgacgcttcgttactgctgtatatagggtttaatcgtttggtttttaataacattgccaactcgatcgactgccaaaggcccccattttccttctagaagtgcttcgccattattcgcttttaagatggccaattctaaatcagtaacaccctctagaaaacaattcaattttgattcttgtttttcaatcatcaaactcaaatccggcgtcttaactgtacttctacctaatctcactttattaattggcacttctttcaacatagcaaacgtccttccataatttttttagtagcgctacagtttaactataaaatattgacttaatttttctcaactattctgattgggttatatttagcataatcatttacctttacaaaacaatttcaagttgtttaaattaacttgtatcactattctaaaaggggttgatgattatcaaaacggtcaatgttatgttcgcagcagataataattatgccgaccagcttttaatcgcgattaagtcgatattggcgcatattcctgctgagacaactgtccattttcttattctcgataatgaactcacaccacaaaccaagtgtttggtgcgacaaattaccaagcaatcacatcaggtcgattttattaaaataaatcaacaacttttaaaaaattgtcctgaaagtaaccatattaataaaacggcctactaccgcattcttgcgccccaaatactattacgcaaagggattagccgcgttttatacttagacgtcgatattcttgtccaaaccgacattacgccactttatgaaagccatttagggactaatattgttggcgcaattattgatcctgggcaagctctagcactaccacgactaggtgtttcccctgaaaaatcaggtaacatttattttaattccggcgtgatgttaattgacaccttccgttgggaagaaaatcaaattagtgaattaacgctacgttttatcaatcagcatcctgagagaattattttccacgatcaagacgctttgaatgccattttagccggtaaggttcaattattgcatcccgcttggaatgtacaaaattcactcatcttccgcaaacatcagccaattaatgccacttataaaaaactttttgacgaagctattgcgcaacctaaaatcgttcattttacaacgcacaataaaccttggaatacgttgaaagaacatccatttttagcgcaataccaagcgtatagtcaacaattaggcgcattaaaaaaagacagtattaacattgtctcagctgttaatgctgcctttattgaacccttggcgattttatatgcttcgattttgaatcacaatgacacacaacgccgctattctttctatgtgttagaagaccacttaactgaagcagacaaaataccattaaaacaggtggttgccgcttttaatgccgatttaacttttctcaaagttgatgaggctctcttggccaatatcgtagaaagtgatcggattttaaaatcagcttattatcggattttaatcccgcaagtgctaaacggcattgatcgcgcgctttatttagactgtgatgctctatgtaacgttaaccttgaacgcctttggaatattgatttaggcgagttcccgctagctgcggttgaagacgccgggttccatcagcgcctcgaaaaaatggccattaagtgtcacagtacgcgctatttcaactccggcatgatgttaatggatcttaagaaatggcgtcaacaagccatcactgagaaaactttagacttcattaaccatcatccagagaagttacgctttcatgatcaagatgcactgaatgctgttttacatgatcaatggctgcatctccatcctaaatggaatgcccaaaccaacatcatcatggataagaccacacccccacaacatttacaacaacaatttattgaagccaaaaaggccccagcaatcgtccacttctgtggtcacgagaagccttggcatgcagtatctacccacccattcaccccacaatatcgttactatcgccaccgcttcctcaaaccaaaacgccaagcgtctatcatccctttttcaaaaaacacacaaattagcttagagaattaatgctataaaaacccctgctaggtccaacctagtgggggttttgtgtgaattgcgcatcatgatcctctaacgttgacaaagtatcgccttaatggtttaacaatttaaactaacgaacgattggagattttcaaatgccaaattacaaagcattacaacaagacttaaccgatgttagtcaatttttaattgccttaggtgacccaaagcgccaagccattatcatccgcttattagaggaaagtgattgtgacgggctacaagtcagcgaactcactgaagcaaccggcttatcgcgacccgcggtttcacaccatctcaaagtcctcaaggatgccaaactaatcgactatcgcgcagaaggcacgaagaatttttattacctcaatcacgacacaaccgaaattgtaaaactcaagcaatttctcgataaagtcacccaaattatgaccacccacaccaaataaggagcgttaattatgcaaacaattttaggcagtagcggtcaaatcggccaagaactcgcaaaagaactctacaaaaactatactcacgacatccgacttgtgagccgtaacccgcggaaggttaatcctgaagatcaactctcccccgctaatctgctcaattttgaagaaaccaatcaggccgtcgcagggagcgaaattgtctatttcacagccggtttacctatgaattctgatatgtggaccgttcaatttccgattatgattaataatgtgattcgcgcctgtcaaatcaaccacagtaaattagttttcttcgataacacttatatgtacgctaaaaatgcgacaccgcaaaccgaaaacagtcccttccaaccagacggtcaaaaggcaaccgctcgggcagaaatggcacaaaccgttatcgatgctatgcaagcaggtcaaatagagactgttatttgccgcgcccctgaattttacggtcccgccaaaaccaatagtattaccaatacacttcttttcaacaaaatcaaagccgggcaaaaagcacgtattcccgttagtgatcaattcttgcgcacgttaatttggacaccagatgctagccgcgccatggctttaattggcaacacccctgatgcttacggtcaaacatggcaccttccttgtgccgatagcattacttacaagggtttagttgaactgattcaagaaatcacgtaccaacctatatcctattcgattattaaaatgtggcaattcaaattagcaagtttcttcaatcaaaatagtcgcgaactacaagagctgctcccccgttatcaagccgacaacatcttcgtttcggataaattcaaaactcgcttccctgaatttaaaattacatcgtttgaagaaggcattcgagagatattgacggtttaaaaagtataatgttaaaaatagcgtcaccgaaaatatcggtggcgctattttgtatttatgactgattaattaattttaaatatcgatagatacttggttccgaggtgcctaatatctcagcaacttttgataaagcacctttaattttaaaaatacctttttcatttaattctcgacaaatttcaattttcttatcctgcgttaacttaatacctggctgcagtgtattgggtgctactaccgcataaatgatttcttcaacactcgaatggagcacttcttcatttgtaacgacttggcgttgctgttgatgttcgctagccactgtaggtactgatgccattaacgaatccagattagcaagattaataagattatcaaccgccgctaaatatggttgcgcattaaaattaatacataacaatcccaacaaaacaccctgatcatccttaatgaagtaagtagacccttgaatttgctggtttttatcactactagccttgtaattaaccacagcatcttgtttttgatatattttattcctaataagatctaacgcgaaaccagtgattggagaatttaaattacgtccgctaatttcagcattctcaatcgctgcaatatagtacgaatcatcttgattaatccagtgtaaaacaacttcataattactacctaaaacttgacctaaaaaatgaactaatccttgatatctctctaattcgctaaccatcagaaccatcctccattcacaatagcgttgttcttagtatcctttataatacttaatttcttgatagattacaaacatttattataataataaattattattgtaaaacgtattgctcagttgtatactttgtttataatacttgagaggatgattatacatgattaaaaatcggttattaattcttgataagcttaatatcagtgttgtttctgttaccttcaagaagtggcgacactattctaaataatcactaactatttattaaattcaaaattaatgaaggagtgagcaatttggaaacaactacacaatcaacaccacatctttcgagatctcaaaaacatgctgataaggcaggcatgtctttaacggaatggcaggcggccactaagtttgacggcacagactggggctgggtttttatgagtattggtatggcaatcggtgccggcattgtttttttacctgttaaagtcggtttagttggcctctgggttttcctggtttcagctgtgattgcttatcctgctatgtatttattccaaaaattattcatcaataccttagccgaatctgaaaaatgcgaagactatcctagtgttatcagtggttatttgggtaaaaattggggcttcctactaggtgttctctactttttaatgctactaatctgggtatttgtttattccactgcgattacaaatgatagcgcttcatttttacattccttccatgttactaaaacagtctggtcaaataatccattttatgggttgattgttatttgtttgctcgtcgcaattgcttctcgtgccgaaaaattacttttcaaaatttcatcctttatggtttgtacgaaactaatcattgtctttgtcctcggcgttgtgatgatccaacattgggatcttagaaatgttgcagcatttcccgatttaggttacttaattaaacaaacaatcatcttgcttcctttcacactcacttctattttattcctccaatccttatcaccaatggttatttcgtttagatcccacaataaaaatattgaagtagcacgctataaatcaattcgtgctatgaatattgcctttttcacactatttttcgttgtcttcttctatgccatttcattcaatcttgctttaggtcatgaccaagcagttgaagcttacgagaagaacatctcgacactcgccattgctgctcagaatatgaacggtaattcaattaaaattctcagtttcattttaaatattttcgctgttatgacggccttctttggtgtctttcttggattccatgaagcctgtcagggaattgccgttaatattttacatcggattatgccaaagcataagattaacaaaaagaaccttagcttcggtattttaatcttcgctatcctagtttcttggagcgcaatcttactaaatgctcccgttttaagttttacatcattatgttcaccaattttcggaatgattggttgtttaatccccgtctatcttgtctatcgtgttcccgctctcaataagctcaagggtcctagcctatatctcatcgtttttaccggtattctactgatgatttcaccgttcttagcattcatttaaaaaataaataaggagtgattattatgtctttacaatcaaaacatttcattcaagccctcaaaaatggtgtcgtgcccgctaccggttgtactgaaccaattgccgttgcctttggggccgcaacttgtatggcccaactgactaatcgcgagattcaagccattgaggtgcacgtttcaccaaacgtgatgaaaaatgccctagcggttatggtccctggtactggcgaacctggtttattagttgctgcggccgcgggggcaattgctggtgacgcgacggttggcctcagcgttattgaaggccttcgcgctacagacttaccaaccattctagacctcgctcattctggtaaagtgactgctaaaacagcacttgtccctgacgatttatatgttgaagtgaccattaaagatcttgaaaatacggtcaccgttgcgattgctggcagccataccaatatcttttctttaaaaaaagatgatcaaattttaattgaccacccccgtcccgcggcgcacgcgagctctgaatcaaaacaatttttacaaactatgaactttaaggctgtttgggattttgccatgaacgaaccattggaacaccttcgtttcatgaaagaggcgcacacccttaatttagcgcttgcccaagatggctttacgcacgactatggtcttcaactcggccaatcaattaatggtgccaaacgtaatcactttggttctggcactgaaaacgatcttggtaatcggatgattgcttacgcggcagcggcttccgatgcgcgcatgggtggtgcgcaattacctgcgatgtccaactctggttccggtaatcaaggcatcacagctaccattccggtcagcgtagcggcagatgccgttcaggcgactgaggaacagctgattcgggcacaaacattatcccatctcaccgccctatacattcactcatttttgcccgtcttatccgccttttgcgcgactgattcggccgcaatgggggccgcggctggtgtggtttatctctatgacggaacttacgaagatgcttgtcatgcgattcaaaacatggctggcgacgcggccgggatgatctgcgacggggccggctgtgcttgtgccatgaaagtcgccaccgccgtttcctcaatgtaccgcggcgttaacctcgccttgcaaggaattgttattccaaatagtaacggcattgtctgcccaacaatcgatgagacaattcacggcatcggacgtttaggcacagaaggccttcgggaaacagaccctgtgattttagatattatgttaaataaataaaagaaccgtcttgcgtgcctaatattggcattcaagacggttcttttattgtttaaattaaatcaattgcagctgttaaatctgccacttcatgttgcattacggttgttggtaaagcctgggcttgcttgcggttaacccaaatccgttgccaattcaggcgctgacaaggaatgatatcccaccaataaccggcagcaatatgcaaatgctcctcgttagtcaccattaattgatcagcaacttggccaaagaaattaagcgttggtttataacagtttaattgatcagaggtgtataaataatcaaattcaactgggatttgcgccaaattctgcttgagaattggtaacgaagcatccgtcataattcctaattgaatccccttagccttcattgttttcaaaaaatcgatgacttctgggaaaacttttaaattagcctgcaccgttaacatttgcgttaaatctgcattctcgtactcataattgaaatcatgcgcacaataccgcaaggcttgttcgatgacctgttcgtaaggcatgaaatattcgccatacatcattcgatcttcatacagctcaaaagctttttgaaaaagtccgcgatcaatctgatgttgcacgccaatttctcccgcagcctcataaaatggtgccgtatcaaccaacgtcccataacaatcaaaagtgattaattttatcatctgccaaccaacccttcagcctatcattttctaactaccccctattttaaaccactaatcctccaaccacaatcgcgttaactttcaaaataaaattgacaaaatgtcatcaactcattacaatttgaaagtaactagttcattacattatggaaggagttcgttacgtgattcaaaatcgcattaaagtcttacgcgctgagcgcaactggacccaggctgacctcgccgaacgaaccggcatttccaggcaagccgtgatttcaatcgaaaagtataaatatacaccctcattagaactcgcttttaagattgcgcaggtctttggggtcgaaataacaactgtcttttcaccagaggaggattcaaaatgaagcaactcatcatgttaattctgattgttctgttagcagttttcatctttttagattttcgcttcaaacacaataagtcgcgggcctaccagaacgatgaacgctggcaattaatcaccatcaaagccgctaaggtgatggctatttttcttgattcaatcgttattttactggcactggccatgacttatttcttactaactgatggtggtagtgaaataatgaccatcagtgacgctgtcagcgatgctttttacatctacgcactcaagtatcccgttgaatattgcgcctaccgttactacgatcaagtcctataatattaaaacgttagttcgttatagaaaagagcgccttattcatgtcatttatccaattgagccttacattaattttgattggcgtggcagccggcatcgttagtaccgtcggcggtctcgcatcactcgtttcatacccagccttacttgcactgggattaccaccggtcacagccaatgtcaccaacaccgcaggcttaatcttcaccggcgttggcgcgtcactcgcttcacgcaaggaattaaaacatcaaaaacgggaactcatcacacttttaccgctaaccttgattggctgtattgtgggggccttattactctttaaaattccagcagaaacattccaaaaaattgtgccctttttcattttatctgccggcattttaatcctcttaccacgccatctccaagttggtcaacccgctaaatggcaagttagcctcgcttggctcggtgttttcttagtcggcatttacagcggctacttcggtgctgcttctggtgtcttgatgctatcattgctctcagtcatcagccaagcgcctttccaagaatataacgccaccaaaaatctaacgatgggcctcgcgaactgtatcgcaacactagtctacgcgcttcaaacgaccatcaattggggccttgtcttgccccttggaatcggctttttgattggcggcctcattggcccaatcatcgtccgtctactaccagaacgcctaactaaaattgggattggcatcgccgcactaggactagcagttagtttatttatgcaagcctattaaaaaaagtctgtcatcatttagtatcccactaaatttatgacagactttttttgttaaaagagattacgacaacttattttttacggatataatgcttcaaaataatcgcaattgctaacacagttactagtaatagcgtctttttaaaatccgtcacaaatctaaaaataagcacgccaaatagtagtaaaactataatggtaattactaaatcaactattctcttcattgtatcccctctgctagttgttcttgcagccactccaaattaacttcgtggtgtcgttttgagttggccatcattttgataaacatcggttgtagattggttgcggtatttaatgccgcttcaatcgcttggattttttccttagtttgtgcaatttggctctgcaagagttcgcgcatttgcgttggttcaacttgatcagtgaatagtagtggtgtgtagaatgggaaagtaatcggcttattctgcccgccataatgggcgaactgtttttcaaaagccgcttctccccccgcagtcagcacatagcgatttttctcgcgcttatcactggcatcatccactattttttcaatcaattgcttttccgctagttgttgtaagttgtagtaaaaagaacccttcgtaaagttcaaaaagaattcgaaataattgttttccatatcagctaataattcgtagccataagcacctggctttttcttcaataaacccaaaattagaaactgaatcatttggcagtcccctcacccgttaactgcgcgatgaattctggatagctcatttggccaagtgcaaaagcacggctcaagcgatacatcttttcctgcggggtttctggtcgttgataaagtgcttctaattgaatagcttcatctggtagtactgcgaggacatcctcttggttggcaaaagcagcgtaataacgcaggccaaagcgccgttgtgaggccgcatcgatatgaatgccatcagggttggccgttaattcggcggcgttgactaaataactatggggatcttgcgcaaccacgttcgccatttcccgattaatgtcattgaattctgtcgcactagcgccgaacccttcttggcctaaaaaatctggtaattgcccgacaataatgggtaagtttgcttgacccaatgcttggcgtaaatgactaaagaccgctgttaacttggcagcatatgtttgataaccgccttttagactgtcactttccccttggtgccataagacaccaattaactcgctaaattcctgtgcgaatttggcttcagcaatcgcgtggcgcatcaacatttcgtcactcgcccactcatcgattgaactgcccccttcagcacacggaattaaacctaattcttcatccgggtgcgcctggacccaagccgccgcaaatgatgcagccggcccaacacccgcaacctcgcgatcaaaatgaattggttcggccatcatttgccagcgcccattgcgcaacatcttcacgcgctcgtgccgcaatcccggcacatcttgaataaatccccgcccggccatatttgactgaccgactaataaaattgacttcatcataaaaatcctcctgaactgatttttatagcatagtctaattagactatgaatgcaaaaagttatttttaaataaaaaacgaacagttaagaattacttaactgttcgtttttaagaaaaagctataatccgattaatcaatgctcgattttttccactgttttactactactaaagttagaattatttacctctaattttactattttttctatttcaacaccaatctcttttacaagattaaccactaaagcattccccatagtgaaataccgatttggattacttacaccttcaagttttgtccaatcttttgggaatgtattaatcaactcagcttcctgtggtgaaataactctatatcttccatttccaggatcttctacaacgtgactcattctcgacactgtgtgttcagaagttaccatcgttctagctggtttattcaatggatcaggataggctatgctgcccatcccatacttatattcatatcctgtccgtgaaatcttagtagttcggaaagctcccttcaattcttcaaactttttctttttttcaggagtcagatacagttcctggttttcagcattaggttctattatatctgctaatgttctgggttctctaacaataggctcataatcagccatatatacagacccatcaatcattaaaccggttcgtcgaaaagctttttttaatttaaaattatctgaaaaatcagataaagattgatacttatataaatcaactttggttaatttacctaatgttttaatttttaatgtatttgaaagtggtgccatacttttaataaactcggtaatttctgactcgtttttcccaataacttcttttgcatcaagtttaaccttagtatcttctctaaatgcaaaaataaaggttcttctacgccgttgtggaaacccataatctgccgcattaatcattttccaagacacaccgtaacctaagtcagataatgttctaagaatcatgccgaaatccctacctggctggtcactgttgacgccaggagatgttaataaccgatcaacattttcaagaaatataaattgtggccatttcgcctctataacttcttttatgtcccaccacaatacaccttttttgccgtaaaacccttttgctcctgatgatgcaacagaataatcttgacacggaaaacctcccactagtaaatccatattcggtattgcttgcttatttaccaaagaaatatcttcgttagtaacattagtatgcggaaaattatttttatatatattaaaggcaaattgatttgttctatccggttcatattgatccgcccatactatttcaaaattcttgcttgctcgtgttaatcctaaatgaaaaccacccacacctgcaaacatttctgcaaccttaattttcgaattactcatgcttttttgttatcctcttccgttcttcatcaataatcctaatagcatcttgtatttcattttcgctatattctattgacaatgtattatcatcaatagccccgtacataatttgctctttttcctttagccgcttatatattttctgatcgataaatcctggttgatcactaaatacatcttcatctttcgtctgtaaataatagtaccgtgtatgttgttctggatcaagtcccaatctatgaattctatctcgagattgcaacataaatgttaaattgaaattatattcaaaataaacagcatcatgaacagtctgatgtaaagaaattgattcccctagcgtttgggggttagaaactaaaacttgaacatcgccatctctaaattcgttaattagtgaaactcgttctaacttatccgtttcgccataaactaaattaactttaattccttcttttctgagcgtactagttattttttgaattgtatctacgaaaatgccccacacaagcactttcttaccttctctaactagtcttgttactaactcaatcccttttaaaaatttaggtgcttctatattactaatattctgataaatacttcctttttgaatcttcgtatcattttcatttaataatttatcaaaatcatctttcgaaattcctaccgtgtcaccgtcatcatcatacgccattaattcgtgataattaatagtagtatttaccaaagatggattagttgatgcttgtatcaaccgaattaatttagcaagacttgaagtttcattatagtaaatagcctctgctaattctagttgttcctcactggctaaacattcctctataatatcgtcatctgctgctggtacattcaaatccttcttattagttcgccaaaagaaaggatgcatcgtttcattaatttcttcaatcattcgaagcttaggatttactaaatcgttcgcatcccagccaaaaaatgaactatattcattcccatataatatatgcaagaagttatatacgtctttatacgtatttggaattggtgtcccggttaatacatatttaaattgtggtatttgagcgatttctaaagctttctctgcccgtttcccattcggatttttaattcgatggacttcatcaaaaaccaacattgttttatcatcaaccagtttctgtaattgatcagcataagattgaagcgcttcgtaatttatcagtactagattacttactccccaatctgtattcaattgatatctaaaatccttagaatgttgagaatcaatcgaaactaatttcttcttatcaccaaaaacctctccaaactcacttttccaactatcaaacgcattaatcggcgaaataacaagtaaccgttcaattttttcatttggtaaggcctctttacgattaagaaaagcaaaaacccctaacaacattgcagtttttcccgcacccgggacagaaaagttagcagcacgcgccatttcatattcatagtatgctgcccgtaaatgtaaatcaaataaaggtctagccacttcagattgaacaatgctcgaaaattcttcgaaggacacttttttattttgtgggaaatcatctagttttcctttataaacttcacctaatattctgtattgttcaattgaatacttattccgcgaaataaatcgtttaacggcgtcagaaacagttatattaatattctttctatctgctcgtttttcagttacactaataattcgttcaatatctttgtaagttgttgttggtttaattgtttggttgtcagcctcaaagaaaagactcaagtcactaccaatttttaacttgcgatctgtacttgttaacttaccttttgtagtatccaatcgaaccacagtatttccaaataattgaaaatcaattctattttcggatacctcaattgcatccggattatcttcaatcggttttatttccttaattgttgtctgattctggtactgtgcaatttcttcatatgctaactctgatatttcaaccacttcaacatcttgttcacaattattccagagccgattaaaccgatcaatattcgcctgaattcttttctgaacgtattcgctagaatcccatgatacatctacactaatactttcgtaattcgtatttattccgctttgagtctcattcatagaaccattaaagaaaatacggtcgtcattagacgaaataatcccaaatttatcgtgaaaaattcctttatctgttaaagcaaccttaactcgagcacagccatttgcaatcataaaggctaagttcccgagttgttgttgtgctttatccgttaattggctgtttcgctcagctatctttaaaggttttaatctatccagtaactcgtagccttctttaatttttaaataatcttcttgtgaaatttcctttgaaataataaattgaacttcgccaccgtttcttgcaagttcttctaatccatccacgtaaagatctagtccagcactactaaagtaaccagaaactcgttgatataacgttgcttcctttagcagtggctggtaaaaatccgtcactaaaccctgtgtatattgtgattgcaatgcatgttttataccttcagaaaacgtcatacttttaagtccttctttaacttatacaaaatatcagtaatatcctttaataagtctttggcatttaagttttcttctacagtaaggttcgagaaactatccacacttatttcatctaaattatacataatatcttctagttcagaaattactcgtgttctctttttatccttcatccctttgtgcactaaacgattcgtcgattgtgtaaacttctccactacttcttttagctcagagtcttgattgattgtttgcttcaactcattcgatgacataattggtttttctttaaaagcatcaataatatcatccactttatcatctactgcatccatataatgttctaaaatatctggttttttaagtacattatcttttaaatcacgtactattcgtgtcgcatcctgattttcattattagtctttgctactgctaactggactaaaactgcatcagtgatagcctctttatcagaacttttcaatttgtttatcgtaccctcaatttcttcaattggaccatctaacttcaagtcgcgagctaaaaagaatttattaactggttcgccacccggagaaataattccaataaatcttagaattaattcagcaaggcgaatatctctgttaattccttttgtatttcctgctccagaagcttttttgtattcctctactgtcatcaattcttcaactttaattgtattgtaaacatcaaatattcgatcaatcggatcataattaatccgttcttctcggcccagttgtaaatctagctcaagttccttaatcgtcttttcatcagttttcttagcagcatctaacggaagaataattgcttcaaaagttttagctatattatcctcagattgatacattctcaatgcagtgaatctacgatttccatcaatcacccgaccatctggtaaaacaacacctggctcttgctgggttttgtctttgattgattgcaatgtatctttcaatgcattagcatttgatttgtaaataaaatcttcaaatatctcattatatttcgaatccccagcctctggaattaatattccatgttctgattgatactgtttataggtcgtatttatccgtccgttctggtcattatagtaaaggtattctaaaggaaccgcgacaacttcatacggatcgttatttatttgccctgaaacggacatctttttagtaataccagtcttttttaatttatttgcagctaccatctctaataaattcatttatactaccccccattagaataattttaacatatatgctaaaatatttttcataaaccttatctccccaacgatatactttctctaactttttttgtgatatttattgtcgaaaaaaattaactctactagattttatatgctattaacctacttcaatttggaggacaccgtttttgactaataaacaaaagcaagattttatttattggcttgaattaaagaggctatcaacaagtactatagccaaatattcaaatcaggcgcataatcgaatttttaaagagttaaaaatatcattctacgaattaaaagtcttaactgatttacaggatcttttaattaaagtaaaaaggcttgaaaagcagatgcctaatgatcccaaaagaatgtattcttctgcagtttctaactatattaagtataaaattcattctgaaactcccgataatcatcatcaagatttagactatctaatagatgtggaagagactttagctagaaccacttcccttcctacacatatcgtcactcctcgggattctacaggattaattagcggcacaactaaccaattttcaagaaataaacgtgtaggtgctcatgcaattcagttagcaaattacacttgtcagattgattccaatcatcgactttttatatcacgtaaaactaaaaagaattatgtcgaagctcatcatttaattcctatcgcttatcaagctatgttcgaacatagtatcgatactattgaaaacatagtttctttatgtccatcttgccatcgaatggttcattttgggttagatacttctcgtattgaattacttgaacagttatataatagatttaaaaatcaattacgactggtaggtactcccattaaatttaaagatttacttgaactatatggaatagatcaaactctttattgattttaaaaaatatacccataacagaatttgttatgggtatattttttactctactactccttctttgtacactgtttaaaccagcggattttcatccatcgctggtaaatatctgcctgccaatccggcaatcagcgttaagaagccaacgctaatcagaccagccaagtgaatcaactggctggtggtgtccgacattgcgacactgccactgatttgggcaatcacggtcgtcatgtcttgttgccgcattacggctaggcccatcaagccaataatcaagataaattgcatgaggatactaccgagatacgtattccgatatttaacgattaaggtttgtgcgggcgttgtgacgccggtgtaataagcgcggtgattcaaaagaatgctgttggcactgccaaagaaactaatcaataagatgcctaataaaattagatgcggcgtaatcatcaaccaagcccccaccacaaaacccaacagttggacttttaaatctgataacttcgaaaagtgcctttgtacgctctttcgaataacttgggctaaaatcatccccgcaccgtaagtgacgtagccccctatcatcaaggcctgattttgaatcgcgacaaaaatatagatcattaagattaattagatggtaccttaatattacgcctgatttcaaagaactgacgttaaaagactaaattgattgcacaaaaaaacaccgtaagtcgttgaaacgacttgcggtgttttgattaggattttattcccattcaattgtttcacgtggatacaaacactgataaatcaacgttcttaaaaaatgtaccgcatttgtaccgcattaggtttgaaaatagctcttttacgtaacttaattatgaggtgattaatatgaaagttttaaaattagaaaggctgggcatgtttgtcgaattgataaactctactattaatataatcgaaaaagacaaaactgtcacgttagattttgttaattccgatttagccgaattttggtttaacagccttgtcacccagattgaatctctacaagactttttactgtataattataatcgaggtgatagcagtgacaagtaagcgaaacatattagctaattttgaaagacttaaaccaacacccggtcactcctttaccttactagtggtaaaagataagtttggctcaacctataacttctacttggaagagctagctggcgctaattacagtcatggattaggatcaatcgattttgacgacctggtcgaatataaggacgcgcttcgtgagttgctggatagcaaggttaaaattgaatatcgcggattttaacgcaaaaaaataagcctaacccacaaattaagtgagttagacttatttatatagttcatttgggcttaaattacaggcatttttactgtaatcattttgattgtatttcttgcttggatataacaagtggtggaaatctaaaaaaagcggaatgatttgcaccttatcactataaataacactagcaatcaatctaacgccttgtccataccctaattcccacaatgcggaatcctcactgatatccgtatcgctatgaatctctttgattatgttaaacgccaaaactttttgatcattttttagaacgtgacaatgggcaagtctttgacttctaaattcttttccattttgtttaatgaacggcagcagtttatcaagtgttaaatatatataccttaatgcctcatcagaatcatgaaattcatttgtaaattctccaaccctagtcgagtgagtccaattgggatacatccccaactctatactcacatcggttgtactagcattaagattgttattgacgagatttgatggacttccgcttttcacagatttactggggcttccaccgttcttaggaattttcttttttttacccataactatccaattctactgatgtaacattcatatattattctatcatcaagttcgatttgacagctctctaacggattgacgccagctctagcaaccttccatggtgactcttgatgcgttaagctttcaagttcatcagctgaatacttcccataaacgtcccagacttgttctaagatatcttcaatatcgtttgctaaattaggcttctcaatattttcattgtcaatattatgataaccgtatggagcatattgatgatagatgtcgctcaaaacaggtccgtgtacccatgcttgaaatttgtcgttaaataatttattattcagttcatccggactgtcgtttgttagtgtcaaagtccacgcataagcgtaatacattagcttctgtagtttttttggtgaaattgattctttcgctaaaaaccagttagcaatttgggaagttgtatattctttcataattatccctcactttcccgttatcctacactaagcatatcatctctacagtcaaccttgtgcataacatgtgcatatctttctgtggataactatcataaacattgttctataggggtttacactcccttaaatatatgataagctatttaattgcctttttcaagaatactgttttataggcatttccgaacaaccttcataatgaacaaaagtttaatatttaatcaaaaaaaggacctaacccaccatttgaagtgaattaggcccttttgtgttatctcaatgcttatttaaacgttccccaagccgtcgaattataacgcactggcaagaatacgtgtacaccgttatatacgtggtggatcatcacataattgccaacgcgtttccatgagtcatatttccagctgctataagctggcaagtaaccaccttgggccgcattgaagctagcagcgccgatacggttcatgattggcgtatctccgtttacgaacgtgccattttcaggagtaaacccagcaggcacgtttgagttgcttggcgtcgttggctttgtgggattggttggggtggtattcccgccaccaacgttagttgtcccgttagctaaatcattcgccaacttagctttagatacgcccattgatgctagataaccataagggtcaacatggtcaccccagatattttgtgtaatccataaatgagacttaatgcccggtgtaccagcaccgccagcatcaagagtcaaaggaatgccgtatttcttggcgtaatctcgagccaactcgatgtaggttgcgtagtttttagcgaactcggccttgtcgtacgtgtgttgtaactcaatttggacgggactataaccatttgcgttaccagccgcatatgcgacgtatcccggttgtccaacttgataaactttaccaccatcgccgactacgaaagtcgaataagcggtatatggtgtgtagttgtttttcatgttagctgcaacgtttcggccggatgcctctgttgctgtttcatgcataataatatatgaatgagaagcaagttgtgaactcccctgatcggcactaaatgcaaaagtgtgatcgatagagtatgacgcttgcaccttatccgtattgatcgaaaaaatcccaaataaaatagccatcatcgcgatggccaaagcttttccgtatttatttttcatcgtgtttccccttttcttctacttgttctgtgaaaacatctaaatatttcattaaccattttacgttaatgccaaaatcgtgggcgttttccaaaatgctaccgcattcataagcaattagaatcgccgtataaatcagtcctaaattaatagggatcactacaccaacatatggcgctacgtggtctagtgccgatgcaaccacgattgtacaaagcgtggccaatttaataacaaccccttgtagattaacggctgacttccaactatgttgctttaatgctttagcgtaacccgtgattaggtcaacgccaactagataaaaccaccaattaataattggcaccccgcctgaaaacataatatccatgatgccgcctcctttgataaaacccaacatttctccacttcctacataattagtttgagacaaaaataaataagcacggcccacatagccatgcttattataattgtcattaagcagccgtgattacgcattagcgctcacggctgtggactttgctaacttttcacgcgcaatcgttgtgatggccttcatagttaaaccatcgaacgtttgcccgtctgttaaatcttcggctgtcacggtcatgttggcgtttaagtagtctgcgccttcgttaccggacaaactaaccgtaatggatgatgtattgccatccccatcgaaattataagttaaagccgtctttttaatattcattattttgtttcctccgtttcattttcaaatactgcttctagttgatccattaataaatcataagctgccgcatcctgattactaaattctgttggataatcgacaataacgtcatagagggccttcattttttcgctgtattctgtaaactcgataactgcagactcattatcaatttcattaatagccgtgtttgcttcatctcgtttttcctcaatcagaacgactgaccccggagtgtcgccttctacgttgttgccagcttcatctttcttgatgaacggttcaagtgtttccttgcgatcttcgttatattcatcatttttagccgagattaacttaattagtttagtgcgaccgcggcttgctttatttttaaggcttagagtgcccaagaaattaccgactactgatagttctgaatttttaaaagttagtgtttttgtcatgctgttttttcctccaatttttgttttaataattcaacttcgttttttaatttagcaattactgggattaaagccggcccgattcggtcgtaattaatcccttctaattcaccatctgtcccacgaacaaccaacatttcaaggccagcatctgcaaggtcttcggcaatcatgccaaagttgcgtgttggtttaggttgtgtagtcgggttgtcttggtaacgtttagtctcggcaatgtctatccatgttgcggttggcagatttaacagcttatccccatagtccgtggcgttcgtccggataatatccgttttgtacttcgatgctgatgtggagcgtactagcgctccatctcgggcaactatcacgtttgcagagccactcgctgttctaacataggtaggtaagctatgaacgtattctccaaggagttctattcgattgctattccaaccttgtgaaccatctgaaccaatacaaatcgaagctgaaccgccaacccaagaaatagcagatgagagcttctttcctgctgaaaggataatccctcgctcagcaccgccaattttagttggatgccaactagtcccgtcataacctgcactgatacccgcaaaagattccgcgcctcctaatggactgtcgaaaatattactagaatttgcgttattagccatcactacataatctcggccaactattctagccccactaaacgctaaaccactaccaccattggatatgctcaaatacggatttgtcgtctcatcaaaaattgttggttgcacgaattgaataccaccatttttaagcaagacgcgagtattaccgttggccactgataaatatccctggtcaatattcacatcgatgttattgtttgccgaatgaatccggccgtgttgaaatacaacttcaccagtgttcagattcatactcaaattagcgccctttaaagtcccggtcgtgatgttattagcattcaggttaatcacattcacattagcggcattaagcgtgccggctgtaatcttatcggctttaatgtctgcaatcatcgcatctttaatcactgcgttatcaattgacgtctgccccgtgatgtggactttttgaccagcaattaagatgctttccggactgatgttaatctggttgactacgtcgcccttttgaacacgtaagttaatgtcattagacagttgcgtgatttgagactgcgagactgccccgctaacatatgtgtcagcagttgccctttttactagcatcggatgtgcaattaaaatgttcccagtaccgttagtttgcacatgaaatcttgcataatttgccccctcaggtactttaatattttcaacttttagttgttgctttacataggggctttttatgtcaaaaacgttagatccataaaattccattctgtcagacgttttgtctttgtaaaaatctatttcgattataaacaatcctgttggtgtccatccatcaccttcgggaccggtttgatacatcactgcggatgctgatacaacttgacctgcgtacacttctatccaatccgaaccagcattggcccatccgatcggagtctgcgttgatgccctgtgaaagcgaagagcattgcttcccatatatacatctgaattattaaagccaaccgaccatagtgaaggattaagaaatccccaaccattaagtgtttggtcttcaaactcagtgtttgtgattaagttatatgcgctcaaatcggtaaccgtactagtaatttgatccgccaattgtgtaacctgtgactggtcagccttattttggactgtgccttgaataccatttactgttatttgtaattgactaaattgaacttccgttgccatatcttctggcgctgggtgccagtccgaaacggttgttgcacgttccatttgataatggtcgaattgagcgttcttatcttccgagttcccccatccactgtacgagctatatacaataatactatcgaactgcttatcaactttcgacaagtctattgccgctacgagtcgaccatcaataactggaaaatctccaagtatggtgaataacttagtatcttcatgattcatcacaccgaccgctaattttggctgcgcaggcgttggtgctataggaatatagtctgttgaaaatacccatacatcttctgtatagcgctgaattggctggaacattacataccattgattagccaatacaccattaggatatgtctgtgtgacgccgtgtagttgcacaaccgtgtcagatctttttagataattacgtgacccaatgtgcatgttatctaagttgctttgcaccttcgacacgctcaaattaatctggtcagccgtgcttttaatctgcgactgcgtccaagtttgagtagcgtaatcgcctaagatgttggttaattctgtcttgctgacagccaacttaatctggtcagcttgcagtttaatttgagcctcggcgttggttacacgcccgcctagcttatcgacgtcgacttgattagcctttaaactaacctgccctttaacggcgtcgatatcagcagtaagtccagttttaatctggtcaccgtgggtataagcgtctagcgctttttgcaacgcggaagccgcatctgatttagcttggtcggctgtatcgtttgcaaagccggctttggccactgcgtcattggcaccatctactgccttattagcctgattctttgcttcttcggcttctttttgagctgcatcggcagcgtctttagcttcggcggtgtcacgcgtagacataacgaatgaccaaactttgccatcccaacgatacataatttcgtactcgccatctggtttataccaaatatcaccaatattcttagcgataggggtgccggggccgtagtaaatcatagtgtgtccgtcagctgataaaacagcgtggttggcactattttgggcttcttgcgagttctggttagcttcattggcagtgttgagggcgttgttgatcatgtcaccaatggtatagcgagtatcgccaagctccatcgatgtgtagtgatcagctaaaacattccaaacgactcgagaaacttttgttttggtgtctacgccaagcttcgtaaatcgaacgggaaccgtgtcacatagatctaaaacttccagcaactgtaaagcttcgtagtttgagctttgagacaaatcaacaaaacttaatttaatcgagaccttaggtacgccaatgtcattagcagtaacatagctttttgcgaactctctcagtttggcctcggttggcttttcaccagctgcaaacttagctgttagatcaacaggtaaaattttgcgattaggataattaccgacgtacttagaatcaatcgttagttctggtagcgttaataatttactttcggaatcagaactattttcggttgtttccgtgtaagtcgcgtagggataaacgcttgtgtaggtgtcagtaatattttcctcttgatcaaagtcggtaatattacggccatacgatagaagcgtattagataccgtgccacgttgctttttcaagctaatatggtaattatcgaatcgatattcaccaccccataaatcaagcagggagcctgccacaccgcctaatgcttggcgcgcactttgaactttatcaattgtccagctagttgaagtattggtttcaatatcggaatcaacaacaagcgggttaacgtcgataatgttgctccgccatgctttaatggccgcatcacctgaaccgctaacgctgaccttcggtttcaattgtaagtcgttggtgatgtaagaaacgtgttcggcgtaaacctgatattgtatctttctatcaaccaactgtttattaatcttcttaataacaaaacgctgaccttttaatacatggccagcgtctactttaattattctgtttttcttaatctcattggcccgtaagccatcaactaggtacgtcatgaccagcgtaaactcaccgtttcgttcctcggccacctcaaccttagtggcatcaggtagcgtacctaagccgagattaaagaagtctgttgcattttcagcgtagataactggataactcaaacgatcaccgcccacctagggacaatcgttgctgtaaatccactggttagccccaccgtactatcaccttttggcaattttgggaagtccgaatacatcttatcgaactgagtccgcttgtgatcaagactcgtacaagtttggttcatggtatcaatgataatcccaccatcaacgctttttagtgataaggcgctgctaccaatacttaaagtacaatcgcctgatcctgtaatggtgataagcggctccgactcaaccttgcccaagtttgttaacttttggccctgttttacagcaatagcggttaatccggacttgataaacttgtaaggataaacggtaaaacttaaatcgattgatgcaaaaaagtcagtcgtacgtttaacctcatgttgcgcataaaacaaggcgttataaacataatcaggctcaccgctccaagttagttgatgataattaccgtccgcaagcaacgcattggatagcgtcgtttttgcttgttcaatcgtttgcccattatccggaaagatatcgccagacaacttaaacggcactgattttaatcggtgattatcggttgcaacgtcgccattacgaccactaacttcggtaaatgttatgtcccgttcaggaatgagcaacgtttgctcgtcatacggaacaaagcccaaagaacttgaatctagtccattaaaatttaaattagcttcactcactatgttaagctcccccttctatttgttagattttgccaccccatgttttccatggtttcgcggatatcctccgcatttttccattccaaactttgaatgttaattgtaggcgcttggcctctaataacattaatcagttcatcaatcttaccgattaaatcctgattattattggtttgatttacaactaccgaggtatcaccctcatgcgcgttaaacgtgctagcaacttcgggtctaactgcaaaagctctttgcaatgaggcgttattagattctgaaagcacgtcatttaacgtcccgttagtacctttcgcaaagtgaggtatctcgcgtttaaacgccgccattgatggccaaaccttagcgccacgttttaaaaccattggcgttggtacgcttggcgaaatcccaaagctaccgtcgggttctaaatacggctcaggctgtccaccgtcaccaaggactgataaaccgcccggcgcattattagtccctttcgcaaaccaactcttaattttcttttcaaccgtttcaataacagttgttaacgtcactttatgatctcgtttccaaccaaatctatctacagcagatgatgcagcatctgctggccctgaagcattatcatttgcttttaaattcttaatcttgggattgtttcgcttaaagttactaatattatcattcgcggttgcaacagcgccccctagcccagaatcatgggcttttaaccccttacttgatggggtgtttcttttaaacccatccaattgattgttgccacgtaacactgaaccacctaatccagcatcatgaccctttaacggcttacttggtggattattccgtttaatgccgttaatttgatcattaccagctttcaccgcgcccgcaagccccccatcgtgtgccttcagtggtttgcttgcagggttattggtcttgtaggtatctaataagatgcccgcatcaattaatttctgccgtgcatcagtattgttaatcaataaatctttttgtttctgtggcagattgttccaagcaccatacttgatgaccatgtctgccaatgcaggtgcgccttttgcatttaaaatggcattcttttctgaatccgaaaggccttgccatacaccgtacttatctagaatgttaactaaaggtacagttgccttatctttaaccaatgcttgttgctctttaagtgtcaacatgttccattgaccaccctttaaaagtaaattagcaatcggtgacgcatcgccgtgcaagatagcttctttttgctctagtgtgaattggtcccaaataccgaactgttgaatgatatcagccattttcttattacccttaacagcaacgatggcttgttgttctttccacgtcaaatcatcccacttaccattcgcgagcgcggcttcaccaatcattaacttagcgttgctacttaaattggcgtgtttgaggtcataatgaaggccattccatccgtctttggattgagccgccttattgacttcttcttgggcgttggttttgaccttgccagttttagggtcaaagattaacttattccattgctcatttgctttagctgtttttttcgacatgttagcagtatctgcggcaacaatccccgtactttttgacatatcttggctttgagttttaacaatcttagccgcttgttcgtacgtatatccaaaatttaataaatcttgagtaatttggtcttttgactcaccattagccttggcaagtttgaatacagacgcaaccatactttctgtagaggcattgtgttctgattttaattgcttcatgtatgcaccgtactgtttagcagaaatggtattgtctgaatatgccttcttaattgttgctgcttgtttttgataagttttttcttctgatctaaattgacttgttaaatcatcaatcgctttgccgcgttgttgattattcatcgtatcaatatcgccatttaaagcagctattacagatttcttagccttgccactaatttttagaagcttaacttcgtcagcattcatacgcgtacgcccattaagtacaatggtacgttcatcatcggttagttttgaaacatcgccattatgttttttgagtacagcttggattaactcattttgtttctttgcgtccgctaaaatttctgcatttgcttttttgcgttgtaaaatatttgacttcgcatctttttttgcaaaaccaggtaggtcgttaatatcatcttccatttttttaatggaattgttggaatctgtaaccatctgcgtgtacatatcattaaaattagaggctacttctttagttgttgtctttgtttttccgttaaagccttctagtgcagcagaagcttgcgtcgagaatccttgcattttagttagcgatttatcggcagaatcaccgacatcacttccccatctagtagttctgtcagaagattcaacggccttcttgccccaaagctcccagactagagcaccagcgccaacagccgcggttacacctaagacaatcggtaatgctcctcctaataaaccaatgccagtagctgcttctccaccagcagaacccagccccgctaagccggctgcccctgtttcagcagcagcacccgttcctttaattatctcaccagtttgttctacaacttcggctgatttttccacggttcctgcggttgttcccacggttccacgtaatttgccggatatttcaataattttagcgtagcctttatgcaatgatgcaactgtttcaacggcaccagccacccctttaactagcgggccaaatgctgcggcagctaaagcagtcttaataatcgtctgttgtgttgaaccatcaagctcagaaaatcctttaatcatatttgttaactctttgattacaggcgttaattgtggtaataatttttgaccaaaagtgatggataacgcttcaagacttgccttaaactgcttctgggtaaactcattggtattacgcatagtaccattgtacttatcaacagtaccagtcgaattactgatttcttttgataagtcacgataacgatcaagctcggcactcattaaagtagcaccgaccttcatgttttcttggcccataacgtcgtataagaatttttgtttctcttcatcgttcatgcccttataggcgccttgcatatcgcccataatgtccatgatattacgcattttgtggtgtgaatcgtagacagcaatattatatttcttcaaatcgtcagctgctgcgccagtcccggtagcaagacgggtcatcatggatgatagccctgtcccgactgaactagcttcgataccagcggacttcaaacgaccagcaatggccaagaagtcagccgtgctgacatgcatcccatgcatagcggcaccggcgttacttgaaataacttgcagatcatccaatgacatcgcagatttatgagtcgcctcagtcatctggttcataatgtcattaccatttttaacaacttgattattcgaacctaaattcaaaccaaattgttctagcattgatgatgtcagtttaattgaaataccagtgttatcactattggcggtcatggttttaagtagctcaggcatcatacccatagcttgcttaacgttataaccatttgaaactagctcaaacataccctcgttgatcttatcggtgctgacaccgtattgttgtgcccattgcaatgtcttgccagatagcgatgccataatagaatcgacttctttggccgaatagccttgggcctcaacttcttttcggacatcagccatttgatattcaaaatctgaggccgcagaaacagccttggtcataccagctacgattggaactgttaacccgatagtagctttgttaccaacttcgttcattttctggccagtattatcaagcttttcgcccattaaacgcgctttgtcggccgagttagccatctgtggtgacaaaccgcccaccttacttgataaagttgccgtttcgcgttggagcttgctttgctcaccagatagctctcgatatttgtttgcggctgcttgtgtcttagctgagttctcaccctcagacttcgataaagcatcatattcctcacgggcgtgttcaacagcaatgctgttttcagcaagcgacgctttcaatgagcgcaacttagagactgaggccgatgttttaagattagccttctcctgtccctctgctagcttgtcaaaataggttgccgttgatttgagggaagcctttaacttgtcagactcatctttagttaaacttgcctgcttagacgttttattgagcgagttagccagcgcttccgattgtttggcaagtccgccatctaatttaatagctgctaaactacttttaagtgccttagctctcgcgttagcttcttgcgttaataattcaacaggaatctttacataaccatcacccgccattttaaaatcatcctttcaatttgccgtcctttcggagtttagcaatatatttaatgcgttcgacacgatccatacccgccatttgttgttctagcgtcaactctggctcatcgcccgaactttcccctaatgcatatagcgtctttaacttactgatctgattacgagcatcagcatcagcgttatcaggtacggtggtggttctaatcctgataacctcgcggaatggggtgttatcattcaaaccgtccagtaacgcattaaattgctcccagtccatgcttagacggatatcagcatccgataaatcgacaccgtattgcattaaaaaagacgcttggattcgcccagcgtcaatttcaaaatcgtatgtttttttatcagatttaaataacttgcttgccaattttgactcgcgtaaattaatctttttatcaaaaatcaacttaaacaattccgcctgatcatcaattgataaatgcttgtatgcatcagacttacaaaatagttgtaaagccagctgcattttttcagcggtggctaatccattatcattggccaattcaaaatatttaagcacgtacgggaatgccatagttaacgcataatcgacgcccttataactgatttgatttgagttgaaatcagttagccccattggctctgtccttcattttaatgatgttattaacttggcgagtcatatagtcttcaacgttatttacttgattaaattcaagcatgacagcagcaataactttattaacagcaatcgaattttgaccaaccatattaaagatttcatccccggctttttggccaaagagtaaatctaagaatggcttgtattcttgtttagcgattttttctgacttgagtgcaattgtgtccagtttcttagtgtattcatttttcaaatcattacgttggcgcatcaaaactgattctttaacggtttccgctttgtcgtcgatatcagctaatttttcagcatattcttgttgtaacacctcagaattttgttcattttcagtttccaaatagctaatttttgagtaagcttcgttaatgctttcgcgacttttatcttctagcgataagatatatttcttatcccccaatgcgaatttaatgctagaagctggttttaaaattcggtgaaccttttggccaccacgtttcttggttgtagttttatgtgtttggttttccatgataaaaatcctccttaaatttatgtaacccgcctaatgacgggtattaaaaaagcccctacgaaattgtaaacttagccgttgtatcggtagtttccactttcactgcttggggcttagctgggtgtgcctgttgctgttgtagcggtagtgcttagaattgttgcattaaccgatggtgtgtcagttaagacttctgttaacttggcgtcgcctttttcaatttgcttaggtttagagttgtaagttgcagtagccttaaatgtcttaggatctgttgctttaccaccacgatcagtaatatcagaccatgttgcaacgccttcttctgattcgataagcgttaatgagccatcgtcgttcatcgtgtattggttcacgcgtaagtttgagtaacgaccaacgcctgtgccaccttttaatttagcgattaaatcttgtgcggggttaccaattgaacgatcacctgaaacgtcgtaagaaattgttgaaccagtgacggttgtacgcgtttggccaccgccgttcatataagatttagatgatttggtgtcatcggttttttgatcaatctgttcaatgccatccccgagatataaccattctttagctgcttcaccctttttatatgatgcaacgaaaacttccattaaaaagttattgtcgattgcgccgagtacgtttaaatctttttctcctgccattagtaggcctcctatttaataatttgtgcttgtaattcaaaaggcattgaccagataacgtagttttgaccgtcatccgtcatcgtgcctgtataagcaaccgccccggttgggattgctgaaataaagttaaatctgttatctgctgacactacgttgccacgtgatgcgttatcaatagcagctgacactgagtctagaaagttaacagcgacgttccaatccgtcgatttagcgtaaattttcaaagagaaccattgacgcacattaccgttaaaataacgtttgcgcttgtcggtggctcttaaatcgaaagcaatccgatcgccagactttctaaaatcaccgatatcagcagctgcataaaaatcaactgattgttgcaagaagttgatcagcgctttaacgatatcggtttgtgtttgtcgcacttctttaacgaccatttataatcaaatcctttgataagttcacccaatcaagcaagcgctcctctttggccatattgacccattcagggcccgctttcttgtggtgagtcttagtgtagttgaacttcttaccatgcgatgaaaccccatcccattgcttttgagcgtattctttagcgtaaacaattgacggatgagcaccagcttcaatcataatatcggatgctagttgaccagataaaaatggcacatactcatccgcatctgccctaatttgtctagccagctccatttcaattggcgctggggtcgcaagccgtttaacccaatcgcctaagtcgatatctggatttgaactattcaaggtaagcctcccaatgatgcaacacttggtcatttttgacgggctcaacttgaattaccgagaagttccgcccattgtataggacttcatccccgttaactggttgataaccatccggattatcggaattaacagcgtcaataaacaaaatacttgatgacagctgctgataagacttggagttgtcaccgatgtttgccattagcgctttatccgtctgctggatacgaacgtgctcaagcttatgctttacactcttagtattctcaaatgaattaggatcgtctctgccatgagttatcgttactttatccggtaataaccggcgtggtataggcttaatcctcattaacacacccccgaatagagtaacccggttggcataagatattgcttggctttctcacttttaagcgattgagcgcctttttgaggcgttcgagaactttgagagtaagaaaagtttccaatcgatgcgttagaaacggaattaaggccgtccgataactcggtagcgccttcaagttcgttaaagtattccgcctgcgcacaaatagccatcttaatacggtgctcaaagaagttagctgggaattcatcaagcgtatgataatcaaaccagccgttgcagagatagttaacctcatcctcagcttgcgattcatatttaacccacaatgcatcagggatatcattgccatgataacgagccttatagtaatcagcatcaacgattgctgtttcaccaatcattatttatccccctcgccatcagctttagcagcttgcgttttgaagtccgcaatagctaacgcttcgctttccttgccgtcttcgctaactgctttgaccgtccagcccttataggttgtgtcagctgttaattttgaaacagcgattggactagcgccagtgccttgcttaacgcccttttcgtcgtaaatgttaaagtttgccattatatcacccctttctcattgcattaaaatagcccctattaagcgatggtaaacacggccgttgtatcagtcgtttctactgttgctgtttggggcttagctgggtgtgcctgttgcggctgttgccgttgaagggttcaccattaataatttagtatcatcatagattgcaacaccatagtgttgatcagcattaaatttagtcaatttgttatccatatcgcgacctttttcaggtaataatccgcgtttcatatagatgcgcaatgcacctggcttaacagcaagaactgtccctacttccattttcttagtacgaacaatttgccagcccaacaattcgccaaatacaccactaatcaagagtgaatctcctaagtctgttgcacgggtccagtcagacgcagctgccttacgcaacttagaaacgtcttttggattcatgaataaaacgcctgtcgttgaggcgtcatcttcgtaggcacggtcgctactatcgtcattaaatgctgcttcaatagcatcaattaaatccaaattaatagccgttttaggcaatgttagccgtgcctttttggcagcagctaaaacatcgttatccatttttgctgcaatggacatagtgatttgtttttgcgcttcgccaacgggatcaccatacccgcttaatgcagcttcatcggtgattttgacacctttaccagcctttttaatagtgaatttgtcggtatctgttgtgagttgtgagtaatcaatagccgcgccttcagcaacgtcttcagcatcaccgatgtatttgaagcgtggcactgttacttcactacccggttgaccttcaagtgtgctatcaattggtgcgattggtgtgaatctaatcatttgtggtaattgtgcgctgatcatgtcagccataacttctgggttaattaaattttctaaatatgttgctgtgtttgttgcttctgccatgttgtttcctcctatttgtttaattgactataaagcgttggatttacgttaaatagttcaactctttgttgataattcattgacttgaattcttcggcagtgacggattggttaccgccacctaagttcttgtcaactacggcgctgccattcggattattaactggttgcccagtaaactgcgggtttctagcaattactgcttctaaccctttgccgatatcgtcaacattttcaatcttggccaatgcaactgcatcagctaaatgatcgtttgaaacgcctaacttaaatgctgctaattgcgcatttgcattaagtaattgatcgttaagttcaccttttgaagcctgttctttagcaagttcttcttgcgccttttgaacctctgttttattggcatcttcggccgctttttgcgaatcgataactgccttcaattcatcggctgattgaaagccgaggtcgctaaggaactcttgttgaatttcttctgctgactttacgggatcaacagcaggtggtgttgctggtggtgttgtttgcccaccattcggttctgttgtcgctggttctgttgttgctggctctgccataatgattcctccttaaatgggtataaaaaataagcagttttaaatggcatgctcaggccagttgttacagcttaattttttgtatttcttcgataaatttggtgatatcggctaaatctgacttgctccgctgaaatatgtccacatctaaattaatagtgtgtaaataccctgtttccgtagctttagtgtcaaccacaaacttcccgattgaaatagtcgccatgatcatcgctccctgttgtattgtctggttaaaccggaattgctaataaaccgcctcattcgtgcttgtcggcttctgaggagctttttagcacgcttcgtggctaattcatcccccagtttttcggaggctgtaatacgccttttagcggctctaattgaacgctcataatagcgttgtttttgagtagcagtgtaatccttagcgttatcggccttgtcaacaggagctggcagactcccatagccgggaatgtatgacatcggatagtggcggcagttaatcccaccgattcctgagggtgtcccataactcgttgtggtgtagaagtatggataacgcttatccttcgtgcttaacgaatatatttgcccttgaaactgaacgtgactcgggcgtgacgcattgtgcgaactaactatcacataagcaccatactcacctgtgcgggcaagttcggcgtcattagttaggttgttaatcgaactatttaagcacattcgtgtgtatgcctctggcgaccagcgcttgccttgcttgtcgattagcgccggtataccgtaatcagcccagcgattagttgcatcccccaaagctttgtctatcggggcgccatttctagctgatagtgttgcgtctgcaataattgacttaaaaacatctagcgcatgcttggtcatattcttgctagccatgtctaaatagttactagaatcgcgttgagccgctaccaccatcatgttaatggcatcatcatcactaatcggggcagcttgatctaaaagaccagcatcggccccaccttttaagaactcctctacctcggccatatcctcattaacaatcttagatagttgatcagcattcttggctttaacctcgttcatcggttctttgaggatgtcctgcgcctgtttaatgatgtcactcgagtaagacagcagctcacgttgccacttgatggcctcagccgcttcattccgtttattggctttaaataaagcgttgatgatcatagtccatatggagttttcagcctcgacaatcttatcaacgctactttgcgtcttttggtttagttgctccggtgttagcattgtcgttcacctcttcattccctagaacgtcttcaatgtcaccctcatcggcgttttcttccttgatacgttgcacataattctcagcctcaacgtcagtgattccattgaagcgtttaatagcttcggtaagtggcattaactgctggttattagtgacacgcatataataatcgaggtcttgattgcggtctttagctaccgagtcatcgaaattaatcgagacattaacgtcagttgggcctgcataatcggctgaactatacttgccgagttcaacgaccatctgaacaactcgcttcaacgcatccccgataacagtttcatgcgtttctttagacttgtgagttttactattctcagaaatgacctcagtagctgttttcatctcaccactttgcgccattgtgaatgtgccagcactgaaacctgtttgacccgctagaatgttaagcagcccattgattgcattaagcatttgctcgtcacgtaatggcaaagtgatgtcatccggcttagcattctctccgtcatcacttttgtaaatttgataagcacgatcacgccaatcaactcgccgtttcatctcgccggtctctatatcaagtttgagtttaatcattgatgacgggatgttgacacgtcgccgacccatttcgttttcttgataaagcatgtcataaagtaaatcaagttgttttaaagtgtctgatgcattagcaattaacgggattccaagcggactagtaagattaatgttgttagcaatgttgggtttaacgtaaacaaacgttggcaccgtgtattgcgattttaggtaaacagttttttcttcaagtccctgataaacttcatttagcgatactttcacaccaatgtcagaaccgttaattgatttgtatagctcatttttaatcacataactgtcatcttcgtccaaatgccattcaagtaatgtgtaataaccaccttgtttcttgaatgcatcgacaattacacattctgtcacgccattagcgtcttctgaaattggtataaatgcgtctgctgtggcaaatcggagcttaaccttatcatcacgcacgtaccctcggataaccataccgcctgttgcaaacatgtattcgagatagcgttgcgcgttgtgataaaaatagttgtcatttaaaacgttctgaacgaataagtgtgccggattatccaagtcttccggggctgttttatccttcaccttttccgttataggtgtgacgttgatcagacacttgttgttaaagactagggatgccatttcgtgagcaactgtcttaggcatattaagcgttttacgcttctccgagtggtcaacgccataattgtccatccaagtgtaatgctgccaatcagcatccccccgataagcatcaagccagttctggactcgactatattcttcttcgttgatcatcaagcccttaacgtctgctaagctattgattttactgattaatcccattcgtgctaacacctcccttatttttgtcattatcttcaatacaggcacctcctaggttagatagttagagtagaaatagttgccagcatatcgattttcatcctgagcatggttattagcgtcaacgggatgtcccgtcttttcatcgcgaacgtaggaaccaatctcttttatgaagtggtaatgcccgtatgagcgcccctcaggttcgtggtgtacttcgactaatttaaattggccattgctcataagattttgcatccgttcaatccctacctcaatgcctttgacggctccaaccttctcatggccgttgttattggcacgttcacaatcaacgtccaacaattcaagttcagctcgcaatactttagcagctggatcaattagcacggtggtataccgcatttgatattcactaacgcaccagtcgataaatgcttttaactcaaccgcatactgactcattgctttagtttcgttgctctcagtacctgagtgataatagttagctactcgattaagcactaacttattgccgctattttctcgcaccatcgtcacaatgttgcaactcattgtcgtggcgtcgttttgaccagcatcacctgagaaaaacatttcaacaggctttccaatcaacgtctggtcagtgtcacgttcaacgtcaagcattgaatagataacgccttgaggcattacccgttcgcccaaccagtcacgccgatacagatatggattaccacttaattcatgtttcatttcagccagtcgttgaggcgtcatgattggattatctttcatagtccaatgcatccagtgagcgttacgttcctcaaatactttgataatcttgtcctgtggtgccggtggatttaaatcacccaagtgataacgcaaccttgaagcagcggtacgccggaatgtttcgttaataaactccgcatcaagtaggttcatttcagagtaagcaactgatccaagtgatagcccacgaattgaattggcagagttagacttgccgccacctttgaagtaaatcttcttggtgccattcggtaaatcgatggctaaatggtcaccgcctcgatcacgtcttagcgagctaattccgtcaaagatataagctaaccctagcccatcaccttcgataaataggttataggctagctcttggttatacgcactaactaaatggagtttgtcaggtgacagcatatagagcaatgctaaacgtgcatcatcagcggccgtcttgcccgaccgtatcgaaccttcgttcacttcaaacgtgtgattaaacggtgaaaatatgaatccggcttgtttttcggaatagtgaatatcggtcaaccatgtttgcattagtcttcatcccctttcgtaaagcgtcgatgcatttcagcttgcattgtcatgataattgggttatctgccccaacaccttcggccttgtcagcttcaactctagcgatcctagcttgatcagcgagaattttggcgcgactactaccaatatccgcatcactcgcttgcccaatcaatttagctttgtcacgaatagcctttaatagtgagttgctaaccgatgtcaaagcgtcctcgattttaagtaggtcatctagctttcgatagacatgcttactttgctggacaactgccagctgcggtttcttaaccgtcattgcccgtccgttaacctcgaccaactctttaacattgcggatagttgacaactcgtcaatttcagcatcgttgaggcctttcagcgcttcctgatagcgttgagtaattctatactgacgaacctttaactgcctgatttcggtgttaacggtcatcaaagggtcatcggtgacaccctcgaaaatcgcccgctcctcatctgtcatttgatcaagcattatcgtttcgtattgaccagtcgtaacagcgttcttattaccacttggagcgccgccgctattaccaacagcattcttattgttttggagcgaaacaaaaggagcgctccctttatcattcggagcgctccttttccatttgtcctgtgacttccattttcgaaccgttgagctagtcacgccgatttctttagcgatgtcagccaacttcttttcgcaaccggaatccatccacattttataagccaaatctctattcggatttcttgcctgtgccactcattaccaccacctcgctaaccgtgttgtttcattttttattgtctaaccagtttgactaactctctaccctctatgacgagcgatacatcgttattcattcttaactgataaaatttgccatcatctttcacttgttcgcttacatccgatagataacaaatattattaatattaactatgcatctatatggctcaaacagcttgataaattcggtttcatagccttcttcaagcctttcgtaatcatgaaccattagttcagtgaacattgtcactcgcccttttctgttgtttattatctgaacgatgtttatcatctttcttcttttgtttaagccacttctctaaacgggcatcggatctcgattgccaatcaggctctttcttgtagctaccctggttcatgtagtacatgttaatcacactttttttgtaacaataattgcaaaggcaacaattgatatttgaataataacgtttgcgatagctggagcaaatacccacaaccaactaatagcaagtaatcccataacttttgcaattaataaaacgatactgacaatatataaaaatcccatctaactcactccttaattttacgtataaaaaaagccataaccatttggctatgacttatttagttctgccattgattgtaaatgttaactgtcctataatgaagctgtcaggcgccccccaaacacctggcacatattggattatacttccaaatttcgactgccttatggtggtcgttttttgttgcactaaaaaagacagcctaagctgccgtttcgactatcctttgtatcttggataatttccatatctggtgtaatcttcaaaatcaaaagccattgcattcatcgtgtccatagtaggttttccgtgaatattagcagatacgtctgttatatatcggatatactgttgagcgacggagttgtcttttatagcttcactcacaatgtttgtactatattttctgtgttctgcgtgaatcaatttagacatttctgataaaagcttatacgtttcgcccttgtccttattttcatgcgcattcttttgcaccttctgcgcacttttaacgtaccagttaacccgttcgtctaactgttcatccgttggcatatttctaacaaaatcaaatgcttccattttttcacctccattcacattaatggtacgacttaaggtatattaaatctagaccctgttgttaatatttatatcctagtcgggacttaaacccgaatcgtgaccgcaggtgcacttccgcgccgctctatttaagctactgggattggactgctattaattagattcaacaaggaaggtcctaccctccttagtttattctgcaatccgcggttaagtctatgatcgtccatagcaacgcgtgttaacctcacgctaaaccctagctccgtttgaccggagaccgattattatgcacacatgtctaatgaaatggaattgaccaactaagcccgaaaggaggtcggctacacgactaatgtactagggttgtatttttgtgttgtgcaacgtgtgttttccgccaccgttgcaattgtctagccttgagtcaaacaaggatttcaacctatatggccgtcgctctgtcattgagctactagactgtgattaaatggcctgccccatgagcatgcagaacagtaatttttaaaaggggattttcacatccctcattttgaatttggtaacagaccacttaatcgcttattagcacattaccaatttaacacgtaattccggactaaaacgacaatcaatccgcacaaaacccgcactttttatttgatgaactcgtgcaagtcttcaatcatgaatgcatctgcaaattgcaggcatgcccgattcttataatatctgaatcgagtttcaccatacccgctttcaagctgagctgctgttacagtgttttcttttacatagatactccatagaatcttctgactaatagcgtcgcagcaatcaatagcttcacggcaacgtgctactacttgctctgcatacagtctttgggtcaacgtctcttccatttgattatttacggatccaccctttggcatatcagtaatgaccggtgacttgataccactcacatttctatgactatagcgttgcatagtgggtaactgtactttaaagaaatgtttaactttatcaattgttgctttttcatttacttgtggaaataattcattaaatgaaaccatgcgtatacccctttattttgttataatatagtcactcgaaacattagctttatgtataagccgccggccagggcggcttttttatttgtctagatgataactgatgattgatccaataataatgaagcctagcgctgataatttaaatattaaatccgcttgcggtgatgctagccatcctacaattcttgccataactattgactagcctccttcaatctttgaattgtcgcctgcgcgaattccagttcattttttaagtctgcgttgtaagcagacaacttttccacctgtttcttcagccgcttgttatcagctttgagttgctcatagttgtccattattcagcctccaaataactagccttaaatacatcgtcagcaatcggtaatctagaccaatggtaaccataggctgttttatagcctttctcatggtttatacacctttgaatcaatacaccattctttttaccaaaatatcttccagcttcattcgttgatttaaacatatgaacaatttcattgtcttttagtgcaacaacaggggtgcttgttgccatgttcgcttttctaaaagtaccgtcgtagtactggttatacttattatcacaccactcaagattacccacgcagttattcttcttatttttgtcaatatggtttatttgtggcaatccgtttttattaggaataaatgcagatgcaaccaatctatggacgcgtcttgtaactcgtttaccgttcttgtgcaatccaactagtaaataaccgtctttatccgtttgccccttgagcactctttggggtacaaccttgccattactatcaattctttcaatactcctaacacgccctaggctacttacctcataataaccctcaaatgattgcacttgtttccatatttctgtgggttcttcaacaagctcataggtggcattaaaagctttgtcttgaatcgaccagtgttcacctttaacacctgttacaatccagtcaccaatatttaattccattgggcctcctagagtcataagtgtgttcattggccattcttcaacataggcaccacgagggactccaatactatattttctaatcatcctaactgacccatcaaactgttcagcttgaatggttgctgtttttctataatttttaatcatcctactacctcccacgctctaaacttaatctctcgcatgttaatcctcctatatgaatttccaacaaacattttcttcaactgatttctttacaaattcagcaaactttataattcctggttctcctgaatttaaaatagcatcactatgttgctgcatgtgtttatttaagacttcaatctgttcggtgcctaattccccatcgcaatccgaatgcaggaaaaactcttttaagttttgagcgtcttcaatatctttataatgcagtctgtaattatcactcatcacgttaccagtgaattccccgaactcaattagttttactaatttttgtcttagtaatgtaaattgaatatgtccgattgtataatctttaacccaagccttctcgcttagatgttcataacgttctgatagttgctcaaactcttttgtatcagattcgtattttgcatggttatttctgtaagcaaagtcgttgctactcggtcttgaatattgctggtatgggtctatcattccaatctctctcgttgcaataattgctaatgacattttaaattctcctaacgactgctaacgcggtctttttattttgatttacatttgaattgtttccattttggcaacagttgcattttttgcaacaattcgattagtggttgtttccattttggaaagtaccactggttattacggataatgtaacaaccacttacatttgattattcgttcatgtttgacgattatgcattaatcttcaaatgttaatcatcttcaattcgtatagcaaccaacgaattacctttgtttttcttccagtaagctggcgccgtccaataccaaattgttttacgcaggacgccaaacttattggccaaatagtccgcagtcccaaggtctatgaattggtcgcccttgtaaactgcatattcagccatttaatcacccagctttctaccgcacatcgggcaataattaatcttaaaactagcgtgatgatatctgccaccattagcctcatcatatttgaatgacgctaacatcttgcggcttccatctatcttaattctggtacctaaaccggtatcgtgctcgttaaacaaatttagtgaatgcctttcagcgtatagatcagcatttaaatcatcgttgcaatacttacattcagtcatcagccttccacctccttgttcaaatcaaccacttcgccgaaaccaagcgttttaactatgtcatcggcataagatttaattgcccaatatgcgtcattttcaatggctgtttcaggggttacatcatcaaatccatagttatccgggttggtcatatagcagttacccgctttaatcccccatcgaggttccggttcggcttcatacccgtagcgtagggcgtcgattagtttccattgattagcaggtaggttgatccaccagaatagatcactatcgaaagtttttttattcattttattcaagatagcggcaattgtcgtgaatggttgcgccacattaagcctcatcgtcgcttgttttatttcgttatcaagccaatcaaatattatcttaggtaacttcactttttcatatttcatcacttaacctcctaccaagctttataaattttctgacaattagcgcaccagtactcaccgccgccaatatacataaaatccccatccgcaaatgttgcaccgcaatcccaacatctatccattagttagcatctccaatcgtggcataaacttcgccctccgtaatcgctactaattcggactcatggcagaaataacgctgtccgattgcatctttaacgcatacaccgtcaggcagcacatctgaaatgcggccgcacacgttgtagttttttaatctcacatacatccctttagtcatttttatctatccttcctgcgctagataaagtaagtctcgtcctctacacgccattcccaaaacttgggattaattgacttaatctgtttctcagttagcgacaacgaatgggagttatccattttgacccatgtatagccgtcgttaaagcctaaataccatccgctctttgggtggcgaacccaccacctacgtttagtcattccctaggcctcctctactcttttaattatttagcctctatgaattcaattccttgtttgaataaactctctagtaaatccagctgcgcttcatagtaagcagcggcattatagttgtgcgactgcttagcccgcttatgagcgtcattgattagttcaattttgtctgccaacgtcatacgctcacctccatatcatcccgatcaacctctatacctgctttaagcagtccagcgtcccagcagccgcgttcaattaaataattgttataacgcgaatgacgtttaatcctttcgcgcaatgccgttctgcctatcccaaagtagttaagcaattctttcgtgctttcaaaataaatccggacgttgccttgcgtaattcgatagcggtagaactccaattcgttgtctacctcggctaggtcaatgcctaagccctttctaattttgtttatgtcattctcaggcaaatctgcccaatcgcaattaatgtaatcggttaaagcccgattccttttacgttgtaatactgtcatttcaaaatcgcctcgcttttaactttttcaaaatcaagataccatgctggttctccgtataagtcaacatgcaatttagtgtctccagattgccgtgcttgccaccaaactgttgcgataacaaaatatttgaatagaccagcacattgcccatcaaatgggttaccaccgcttaggacatctcgtttcatctcatttcgaatgtaagtaagcatgccagggtcgtaatcttgttcacctgacactctagataactctttaccccagttaattttcatcttgatcgccttccataagtgccataaattcagcatcagtcattgcaggcgtttcgatcttttcaggtgctttgtaatcaggtttcgcccattctggcgtaggctcttgctttatgtttccgcgcttagaccggctactgttgttgaatctaacgtcatcagcattcacatcgtcaagcgtctttaaattcttcttagcccactgtttcatgatgccctcagcatagcgaaaacccttttggtcaagagctgcacgtttcattgcctcaactaccaactcatcgcctagatcgttgacccactgcgtcaggttttcgctaacaaagctgtttaacacgccaaaggcttcttggtagtacgtgtaaacgtcaggagcagcagaagcttggtcctcgtctgttggttctgttgctgttgctgtgttggttatattctggttctgtgttggttctggttctggttgcgatatcgtatcgatagggtatccatatggtatcgatagggtattttcatcaggtaatttagttttgacagggtatttaagttcaacacacttcttgatgacttctgattcaaattcaagtgttttgatgcttaaaagttctttatcgattaccgcagccactttaggtgatctagccgaattgtatttcagccaattgataatcatgatttcgttgttttctgtgctatatttaatcttttcgtactggaccagcttgttgatgatgcttttaatttcgtctccggttaacccagtgtcaaactgtgcttgtcgcattctgaacggataaacaccgcattgggtagtttggctattagttaacagataagcccagaaaagcttttctgggggctctgtcagcacgtcgccaacgaagttatcttgccaaatcgttgtatgaatctgtctgtatatagccatgagctacctcctagaatggcaaatcgttgtccgaaatatcgattggctgtccgttatttgcgaatggatcaacatagttattagctgttgctgctgaacttggcgctgtattgcgcgtgtcagcatctttatttagtggcgataagaaataaacccgatagacgctacaatcattggtgtaaaccttttgtccttgttggttttgatagctgcctgtttgccagctgccactaacaccaatctttgaaccttttatctgattacttagcatttctgctgtcttgccaaacgcaacgcagttaatgaaatctgtgtgattagcatcacgccttactgccaatgagaatcttgcataatgtgtttgattgctgcttgtttccaatttaatatcggctgttaagttgccgattaagtttactgaattcatttagtgccctcctataggtctaataccgaaatgacatcggttggttgttttgtatccttgcagtaatcgcaatgatcacatttgaacggctctgctttcccgtaaataacgttcataatatgctcttgattgtctttaataagctgtaagtcttggtcaaagtcgtaaccatcaaaactaatcatttggatgtctggatggtcttctttactaacagcaatcacaacgggtgtaaattcatgcccatacatttgttcaagcatagtcttgtatgctgccatttgaagtgtgtagttataacggatgatgaaattctctttagtccgagtttcttcattccagatatgatcttgaattgaacgcgtggtttttatatcaaaaaacaatcctgcttcaacattcaaacaatcaatcttgcccttccagtcaacaccaaacagattacctgtcacgatagcttctttttcgccctgataagcagccttaaaagcgtgccagttgtctaatctatcaatcatcttttgagcctttacgtaagcagctttaggctttccgtttttaccattaatacttgaactgtgggcatctataaaagcttcgtgcgcttcttttgattcgaaatacgaatggacgaagtttccaacaatcaacgcctctgcatcattctcaacaggattctccaaagcgtgcaacgcgctaaattcacacgacataaaccttttgaacaacgtaggactcatataacgccaatcagcagcgttattatagtaattctgattgttcaacggctccttcaatttcttttgggtcatcttgcttagttggctcaataatttcaggttctgactctgtttcagattctctaacatcgtttgttgcatcatttccactcccgataatgtctgctaatttattttgagttttacttggcgctggttgaccttgaacaacctttgttgctgtttcattagggctcttgtcatcttctgtatacatagctcctaatgattctgggaacgcttcacgtaaagcattaacaattgcagttttgcggatcattgtcgcaggcatcgctttccaagtcgattgacctttgctgaactctttcaagccgatttcaacatgatgaggctctgaacggtccttacgtttaacatcagcccaagcccccactaaatcatccgtaggtagtgtaaaggcgcctttcgtgtaaactatctcgttgttccttaaaacgatacaaccggctgaaacaccgtcgtaattaggtgacgattcagcacgcttcataaacgcttcttttgacgtaataatttgcgcaggactgtcgccgaatttgataatgtacgcttccttcaagaaaggatttaaatgctgatatttacatagatttaaaaacatcatcgtttcctgcggcgtgatattaccattaccacttgttaaaaattgttgaatcatattaggcgttaaacgaacactctcgccgtttacttcaaatgaaacttctttgtccattacttcgtttgtcattatctttctacctccgttgcacctaagtatttaacaaaatctagtgcatcacctggcatgaaaagttctccgttaaactccaaacagctatctgcgttatagattgcgtcgcctttataatcttcagcgaacactgtattttccggttcatggtactgccaattttgtctttgaatagttgctaagttagcgctcattattcgacctccatttttaattccaatccgtcaaccacagtcgcgataaatgccttcttaatgacttcaggtttatttcttaatgcatcaatacaagacttggctaaaactacgattacttctgattgatcaccgtacgcaatgctactaattctagaattgccatcttgaaacatggccgtcgctaaaataaaagcaccttcttcttttttctttaattccaatgcttgttctaactggtctatgatttctttattattcacaatttttacctcattcaattctgtgatataatcatcgtataaatatttttaaatgttactaatcagtcgttgatgcgccagcatcagcggcttttttgttgcgctcattgtgcctttcgattaggtcgtacgtaccggcgaccatcaaacttaataacgttactattagacttgtcatcatcgaacccccatagatttttaaatccgattttgccagctccataacaaagaccgccaactgtgatgaatgctagtaataagacaaagccgtcaatcttaatcatttaattgccctcctattgtttgctggtgatcagcaatccattttgtaacagccttttttgagtaagctttacggctaccatcaccgataaaagggaagtcgagtgaattatacctactatcaaaagtcgctgtatcacaatgaaatatcgtcttacacatggtttttttgtccataacgtcatcattgttaacgtattgctcaaaaagtttagcggtatttttttcgacaacaggtgcaatttttttaaacaacttatccgctattagctcggctaatgcatcatctgttctatcgatttgaataacttgacccattttttaaatcctcccatcaattgctatgcgcagcgactgtttaacagctgcgctataacttgtttctgctaaagtttcctcttccaactcttttgaatatccggacataaattttatttcggaatcgttccaatcggtcgggcttttagccatgattgaaaagaatgactctttttctaaaccttttcggtcgttttcttccttaatacttgcaaagaagcgggtttggggaatgtcttgcccctgatcatcaggaagcaattcaatcccgaaaacgtattcggctgccaaacaagaaaatctataatcgcccaacaacttagataatcgcgctaactgatcaataggaaagtttctagtttcacttaaccaattactcacgttagacgtggttgtctgcaattctttggcgataaattgcttttgcattccgctacgttcaattgcagcttcggcttctaatttaatttctgtgagattcgtttgtaccaccacctttcattgtgagaaacgctctatatcaattcaccggctgattaattacaattaaatcaacggttgccattggactcattccataatgacaatctcttcatcatcaaccattaactggtacatgcgtttaataaaagattcatcatgacggtctagcatttgttgaattcgttcggtacctcgaacctccgccattgggctatttagaatatctcgtttcattttgtcgattgacatgtaatcacctccttcaaattacacatattgtttaactttttccgaaataaaaagactactcgatacgtttagcgcttttgccgctaacaaagcattctcaagacttaatttcccatgaccatattcaatattcgctaatctttgagggctgttaaaccccatcagttcagccaattcacgttgtgtcattctttgtttcattcgttctttgcgcagaatcttaaaagcatttggtttaacgaacatgtaaacacctccttaaacatttcgtttaactctataaatctattatactaaacattccgtttaagtcaatataatttctatactttttgtttatttttttaaattaatcgtttaaccgttgtatactgatttcgaaaggggtgattaatatgtccaaacttagcgaacggctaacccatttaagagaatcaaaggggtggtcaaagactttggtagttaaaaaactaggtttaaaaaacctaggcacatatgctaattacgaatatgggactagagaaccggatatggataccatcgtaaaattagcacaactttatgatgtgacaactgactacttgcttggtaaatcgaacaataaaaatacaatgttcccccctgaaagcgacgacattctaacaatgtataaaattgacacacgtggccttacagaagacgaaatcgacgacatgcgtgaggagcttgaagagtataacgactttatgacaaagcgtctccaagaaaagattgctaagaaaaaacgtaaataagggctgatttcatgtatgacgatgattacttcctagaattctataaaaatgtgcaagtgcaaataaatggattaacagatagggtttcgttaaaaacaaacaaaagcccggcaagtcttcgctggacggatttaaagtcatattttagtaataaatatgatatcgattatatagagtacccttttaagtcttctcttcaaaaaagattgtccggctcaattaagatggccggcgattgtgcaatcatcggatacaatggcagcatgtcaccgaatagacagcgtttttctcaagcgcatgaaactggacattttttcgatagtttagtacttaatactggagaaactcagcaatttgaagatttactcgaaaaaaattacggtgaatcaaatttgcccgatgaatggtttgctaatatttcagctggtatgatgctaattgaagagtcaggacttctttactctctccgtcaaggggtatctttccaaagtttatgtaattcatattcggttagtaatacttgcttgaacatccgattaaagcagctacttcaatttgggtatcaagtcaatagttactatgcatacgaagccgtgacaaaatatagattgcataatgacaactcgattttattaggttgcctatcaagagtagaagcatacgtatagaaagggaaatttttaatgagcgatattaaagaatggtcaattatcggtcagcaattatattctgacggaaaacgaccttactgcttaaaatgtaaatttgctctcaagggtgaaagggtttgcccaaattgtggcattaaaattacatatccgggtgaaaaccctgatggatcaattagcaagagtacccaaagggcggctaaggcgcaagaccgtgccaataaattagaaaaaacaggcgaagcattaaactcatttgggaatggcataatggggtgtggttgttccgttatatttttgttcatactctggataatatttaaatcatttatataaccctgtatgaatgtccaaaaactgatgacgttaaaagctgaatatacttggaggggcattaatgataaagaaaaagttttataaggacgtatggttttggttgttcatcatttctttcttgatagggtcttttttcacaataggagactttgctattactggggataatcaacacttaacaagtcaaaataaaaaattaaaaaaagaaattaagggatacaaagcacttttaaacttatcagattataattcggatagttcggatgacgaatcagataactcttcaagttcagacacagaaaaaactttttcagtaggcgaaagtattgaatttaagtccggtgaaaaagtaactgttaactcaatatcaaatagcggtacgcaattacaagacgctgatgctgatcagcatgccgttgcagtcaacgtaactattgaaaataccggaagttccccgttagatttcaatgctcaagaatttgatttatatgattcagatgatgaattagcagaatttaatgcaataacttatgaaaataacatccctaattcaatagcaaccggaaaaaaagccacaatggacttaatatttggtgctaaaaaaacagggacgtattccgttacatacggcgatgcaacttggcataattaatgccatctccccccactctggtgagttcagccgcgttcgattcgtggctggggaataagaatacttacataattaagtttaatgttcgtgttctaaactggtcgaaatcgaccagtttaaaaatatgagggggtatattatggtcagcaaacgtgattctatagtaactaaaggactatcgatagacttattcaatgaatcgggtaactctgtagattatttgagtttaactgatattgcaaaatatcgagacgccgaaagtcccgctgatttaataaaaaattggatgcgatcaagaagtacaatagaatttcttggtgcttgggagaaattacacaacgaacatttcaacaatgatgaatacgaaaaattattagctgatactggttctaattcctttcttatgtctccttctaaatggattaaaaccactaattctattggcataacttcgaaatcgggtcgatacggcggtacatacgctcagtcagatattgcattcgaatttgcctcatggatatctgtagaatttagattatatttaattaaagactatcaacaacttaaacaaaaagaatctagtcagtttaatgttgaatgggatatcaatagaacattatctaaagttaactataagcttcatactgatgcaattaaggataacttaattccagaaactctgtccgctaaacaagcaggatataaatacgcatctgaagcagatcgattaaacgtagccctatttggccaaactgcacgcgaatggaagattaataactcaaaaaaatccggaaacatccgagataacgcctctattatgcagctcaatatacttgccaatttagaaagtatgaacgccgaacttataaaacaaggaatttctgaatatgatcgtactattaaattaaatacaatggccaaagagcaaactgagacactgctcaataatgctattgcccaaaaacaactggatcatttatcggatattaaacaatagaacattatttctgtatacaaatgtatgttaaataatagcctatctaacaacgaagataggctattatttaacatacagaaagaacatacattcgcataattgtgaaattatactgtattttttcaaaatttaaaggagtagtaatcatgcgcaagtgggaaccattaaagaaacatccaaacatctacgtgtacgagacgaaaaaaggcaagcgttacggaataagacgcggatttgtcaatagtgaaaataaacgagacgaattcacaaagagcggatttaaagattggcgctctgctgatttagtcttaaaagactttgagctaaaactaggtaatggtgagcttgggccagttagccatagatcaatgaccgttgatatggccttgcagcgaatggccagttacaaagaagctcgcggtctctggaaaaaggccactaaaaaaaacacaatgaattactataatagatatctaaaacctaagttcggccaacgtaaactagccgaaataactagacttgagtatgaggcgcatcttagcgcgttgatcaaagataatttggccaataccacaatccatacaatcaacggcgttatgcaatcgataatgaattttgctgaacgaaatgacgtcattcaaaaaaacatgctacgaagcatggagattgtcggcgggaagccagctaaagagcaaaaattagagaaaaaggattttgatcactggatggctactgccaaaggaatgtattcaaaatatatcatttcactactagaagtcgcatctcttggcgaacgacgtggtgagctgcttggattacgatttaaagaccttcattttttcactgaaaacgatactgatttttgtaaaatttcgtggaacgtaagcagaactcctgaccagctagaaggtggttccctcaaaaatgctggtagcgttcgcgaaaattatgtaagtggaaaagttgtggattatttaaagtatgctgctaaattttctaagcttgcttatgagaataaagacataaccccgacagaagatgacttcatttttatcaatccggacactgcaaaaggatatcatccatcccagattaataagctctttaataagataagtaaaaaagcaggcgtcgctgtgaaccctcacctgctcagacactattttgccacccaagcacttaacaatcctaacgttgcagacgtcgaagttatgcattggcttggacacaaaaatattcaaatgacagcaagctacactcgtgatactaaagacgcgtcaatggctttataccaaaacgttcagcgtgattttaaagtgctagacggtacaaaaagcaaaaaaataaacggtaccgcctaatgtaccgtatgccattctaattatttcgattcaattcggctttaccatacaaaaaaatcgcctcaaaccaactttaaaagctgatttaaggcgatttaattcgaaatagaaattactattctattcccattccaccgttgatggtggcttgctcgtaatatcgtacacgatacggttgacgtgatcgacttcgttaacgattcgcacagaaaccttttgcaagatatcccatggaatccgtgagaaatcggctgtcatgccgtcgattgagttaacagcacggataccaactgtgtagtcgtatgtccggccatcacccatgacacccacactacggatgcctggtaagactgtaaagtattgccatacggttttatctaaaccagcgagtgcaaattcttcacgcagaattaaatcactatcgcggacaatctttaatttgtcttcagtgacttcaccgaggacccgaatcccaaggccaggacctgggaatggttggcgccatacgagttcatatggcatgcctaatttttcgccaaggtcacgaacttcatctttaaataatgtatttaaaggttcaattaagctaaattgcatgtcttctggtaaaccaccaacgttatgatgtgatttgatggttgtcgcagtacttgtaccactttcaataatgtcagtgtataaagtcccttgcgctaagaagtcaatcccgtttaacttagttgcttcttcgtcaaacacttggataaattcgttaccaataatcttccgtttcttttctggatcagaaacgccagcgagtttgctcatgaaacgttctttagcgtcaacttggatgatgttcaagccaaattttccgccaagactttccataacttgttcaacttcgccttttctaagtaagccgtgatcaacaaagatgctgaccaattggtcgccaattgcgcggtgtaataacaccccaacaacagatgaatcaacgccacctgaaagaccaagaagaactttcttatcaccaacttgttcgcgaatcttttcgatttgcatgtcgatgaaatcgttcattgtccagttgtcttgggccccacagacgccaaatgcaaagttcttcaagatatcgttcccaaattcagtgttttgcacttcagtatggaattgaatcccgtaaatatgtttgtcgcggttttcaatggctgtaaatggtgtattatcactttcagcaactgtcacgtaaccttctggaattgcagtcactttatcaccatgactcatccacactgtttgtttttcaggaagacctttgaataagtcactgtctttgtcagtcactgtaatttcagccttaccatattcacgttctgttgatgcttcaacattaccgccatttttgaaactgatcaactgcatcccgtaacaaataccgagaattggaatccctagttcgaaaatttcggggtcaactgaaaaggcaccatcatcgtaaacactcattgggccgccagagaaaataattcctttaggggcgatcttcttgatttctgctgctgttgtcgtgttaggcaacaattcagagaaaatcccgaattcacggatacgacgtgtaatcaattgattatactgactaccgtaatctaaaacgataatcttatcgaaatcttgcatgtccttttgggccaaacaactcactccttttttattaaagccgagtaaaacttaaatggtcctcgttttactcagctcgattagtaacgctaaaacttttttataatgtatctattctactgattaatcatgaaaacgtcaatggatgacagccattcctgtgaaaaaactcattctatcattaatattttcgtagaaataccttatcgattaggtgatgtcgcgttttatgcaaaattaaatcagcgcggtttcttgttggtaaaatatactctgttaaattacgtaaatcaatgtcgcgccagacacgccgggccatcttaaaggcgctggcgcgatcactaatcgcataaggataataatagttcgttgggtcatcctttgcgagatctaataagaggtcaaatcgttctaggaaccacttctcaattaaacttggattggcatccacgtaaactgaaaagtcgaagaaatcactgacgtaaatttgttcagttgtcggtaattgtaaaacgttgatcccttcgacgattaaaatatcggggtcatcgatgatatcaaactcatccggaataatgtcgtagatttgatgcgaatacttgggcgctttaaccggcgccacgttatttttcacagcattcaagaagctgatcaactgcggcatatcataactttcggggaacccttttttatcgagaatccctttttgcttcaattcagaggttgaatataaaaagccatcggtcgtaatcatttgaaccgtcttatctggatagacccgactcagtaatagctgtaataggcgtgcggtggtactcttaccgaccgcgacactacctgcgataccaataatgaacggggttttatgcggtttgatttctaaaaattcagactgcttaatttgattttcttggaattgttcatacttcatttgtaataaatgacggagtggcacgtaaatgtcactgacatccgttaacgagatgcggtcgtttaagccgctgacttgctgtaattcatcgtccgtaatggcggtgtatttttcgccacggccgtgaaaataacgccattcttctcgcgagatttcataatagttcatctcgtttttcatgctttaatcctcccagggcttaactaactgctaaacggttacattttaccataattaacacaaaaaaaggcactcaccaagcaatttgatgagtccctctagtcgtattattttgttaatgtatatttttctggatcgacgttatcaatcagtggtgagagtgcgtcagtggctaacaaggtcaagcgatgcattgctcttgaacaaatcgtgtagagcaattgccgttgatcttcatgattgtagttggcggcactgatttgccagccaataatggcatcgaattccaaacctttagctaagaaacttgggaccactaatgtcccggctgctaaacgttggttttcggaacgaatcaaggtgactttggttcccgtttccttgagcatcttcgtcaattcttgggcttgcaccaatgtcttggtaataatcgccgtcgataattcatccgcttcatttgcggctaattggcggttaacatcagccactaactcagcttctgattggcgcacaatcaagtttggtttatcgccaactcggttgaaggcttcgatggcttggccaccttttaataagcccttggtaaagtcggtcacttgttgcgttgaccgatatgaacgcgttaattgcaccacttttgtattttgggcatcaaataattgttgcacttgttgcaagagatttgtgctgttacccttagtgaaaatcgcttggttcaaatcgcccaataatgtgaagcgcgccttagggaagtggagcttcaagaaggccaattcataaggcgtgtaatcttgaatttcatcgatgaagacaaaacgcatatcacgttcaccttttttacccgtcatcaaatcgtagaggtgaagataaggtgtgacatcttgcaacgtcatctgcttagccttcaattgtgcgacaaaatgcgtgacgtggtcttgccattgctcttctgtaatatcaaaatcggctaacttcacaagttgtggcacaacccgtaagaagtgaatatattgcgcctggatgcttaagaagcgattgcgttgaatagaccggcgaacgggtttgaacgcttctagcacgatctgcttagcaataaacttgctttcagcatcgcccgtcttgaaatctttaccagacatcaattcgcgaatttcttcatcactcatattctcggcttgttcagtcacccagtcggccttggtttcgtgatcaaccttgtggctcaatgtccgcaacaaactttctttagtggcatctaatcgattgccgagatggtagttttcattaaaccggtaataaacctcgctgatgtgttccttagtaattaagacgcggcccttgaccttcatatcgcggaagcgcatgtcggctttttcaagatgtgcagcgtactttttaacagccttataaaagacgagactttctttcaagcgactaatccggccatcggtttcgttaactggtgtttcgaattgatcaaagaggctctggaccgccatgtttggtaaccggcgtgccacatattggaagtaagtcatttgaatcatattttgttcgcccaattcaggcaacacatctgcgatgtagtcgttgaataattggttaggcgagaacatgatcacttggctcgaatctaaattcccccgatagcgatagagtaaaaacgcaatgcgttgcaagatagctgacgttttccctgagccagctgccccttgaacgaataacaaatcagcatcggtattacggataatctgattttgttcacgttgaatcgtcgtcacgatactcttcatctgtgtatcagatttttcacctaacacttctaataacatttgatcgccaatcgtttcttgcgtatcaaataaggccttaatttggccatcttcaatcaaaaattgacgcttaagtgagatattcacatcttgcggaccgtctggtgtttggtacgtcacagcgcccgtcttaccttcatagtaaattgatgaaattggtgcccgccaatcataaattaagaaatgatcgtcggtatctgtaaatgagcctaacccgatataaattgattcggatttaggttcacccttttcttgaaaatcaacacgggcaaagtatggcgtcttttccatcttttgcaaggtttccaattgccgtgaagattgttgccacgagtgattgcgttcttgtagcatttgccgctgctgttcaatcgaaacggcggtttcagtcatcgcggaatcgttattgaagttaaggcgaacgtcgttgaagaagttctcgttaatttctttttcttccgattttgcgcgcttaacagccccttcaaaatgggtctcagcttttttaattaaaccaataatttctgttaatcggctttgttccaatgatttctgtacgtcagtcaaagcaaatgcctccctattttaaataaatagccctaccagtttaacacttaattcacatgagtgcgagtcaatcggcctactggctattgtcagctataaaccagcataaaagccggctgcagccaccaaaagccccaggccataggtcaaaagccaataaccaaagaagatgtgataccggcgtcggaaccacaattggctcaactcactatttaaggttgaaaaggtcgtatacccgccaagcacaccgacgcctaaaaagagcgtcaccggctgacttaattgagatgcggtcaaccagcccagacaaaagctcccggttagattgattaaaaaggtcatcagtgggaattcactagcgatgtgattcccaattcgcgtcaattgataccgcaaaatggcccccaacgctgcccccaaaccaactaataaaatagtcattgtgagacctcctgttcttcagggccgtgtgtcaatttaaccgcccagtaatccgctagtaaactcaacaagacgcccccgaccatgctgatcccgacataccaagcaaaggctgaccattgttgctgatttaccaatcgaatggcatcaacactaaagctcgaaaacgttgtgaaagcaccgaaaaagccagtcccaattgccaaggctaattggtcactcaaatgtaagcgtgccacgatatagcgcatcaaaaatggtaggcaaaacgccccaatcaaattgacgcacaaagtcccatacggaaacccagttggctgattcaataccaatccgattaaataacgcaagataccaccgaaaaaggcaaagctgccaacggctaaactctcttttattttcataatcgtgacctgacctcttcttgtttttattccttccatactaaccaagtttagtcgaattgtaaattgacctttaatttttaaagtatctagtgtatcctcttaaacaactttgtatttcgaaaggatgttagtcatgactaaccttgcacttgtcatcgttttattagcggctttaatgacaccgcttctgatggctaaatttaaaatgtcctatctgcccaccgccgtcgccgaaattatcgtcggcattattttagggacgagtggcttccatttaatcgtctccaccccgactttaacggaactctcaacgctgggcgtgaccgttttgattttcttaagtgggatggaaatcgattttgacctctttaaaaaacaacccacaccaactgatccccaactaaaagtccaaccgagtcctgtcagattagcgattaccagttttgcctttatcttactgatctcatttggcttaagtggcttgctcgcttggagtggtttctttaaagatattggtctggcaaccatcctcttttcaacgattgccctcggtgtcgtaattgccgcgctcaaggaaaaggaactgcttagccaaccactcggccaaacgattctcttgattgcggtgttgggcgaaattattccgttggtcgcattgacggtttattcatccctcaataaccccggttcgaaaagtctctggctcctatcattaattttcgttgctgcgatttatttgttagtccgcttcaaaggcgtctatcatttcttcgcccggattgataaatccaccacgcaactcgacatccgtttggctttcttcttaatcattacactcgtgtcaattgctgaagaagtcggcgccgaaagtattttaggggccttcttagccggaatggtcatgaaattattacggccacgcgaagaaacaaccgataagttaacctccatcggttacggctttttcatcccaatctttttcatcatgacgggtgctaaattggacctgccagcactcttagcggatcgtaaatcgttgtcgttaattccctttttcttcatcggttttatgctctccaaagcagctacctactgggttttaaaacggcgctttaaacaaactaatgcgattgcgggtacttttttaagtgcgacaacaattacgttggtcttacccattttaacggtgggtctaaacttaaaaaccattaccgaacaacaatccggggccttcaccttggctgccattttaagttgtatcctcggtccgatcctattcaatcgcttctatcagccaactcctgaagatttaccgcgcaaacgcgttaagtttatcggcgccaacattatgacgattcccattgcccaacaactatcaaacgggctttataccacacaactcttcactgataaccaaggtaattacgaaatctaccacagtgccgctgacctgaccttactaccagatctcagtgaagacagccttgtgacatccggtgcttttgatgccgatattatcatcctcggttatctgaaccacgaacaaaattatcgcctcgcccaactagcacttgacgctaaggttccccggattatcgcccggtttgaagcaaaggatatcttagatgaaaaatacgatcaacttaaggaacaaggcgttgaagtcttcaatacttacgaagccaatatcagcctactgcggagtttaattgaaacgccatcgacacttcaaatcatcgacaataccgatgccggcctcttcgaagtgaccgttcaaaaccgacgcttcaccggcttacagatttccaacttgccatttgtggaccaagttaccattagccgaatttaccgcaatcaggaactgattatgccacatggtgacacgcaaattcacttgaacgatcacttgatattaaccggtaacaaaaaagctgtaccagcgattagacagcaattagaaacccgcaactaatccttgttaacactcgcacatttcctttaataggtttataatgaaactatcataattaaaggatggtgcagatatgaaacaaggaacaacgatcctcacattggataatggttatcatttgtggacgaacacgcaaggaacaggcgatattcacttactttgcttacacgggggccctggtggcaatcacgaatactgggaaaacttcggtaaggaattagctgatcttggtgtgcaagtacacatgtacgaccaacttggttcattttattctgatcaacctgattactcaaaaccaggcaatgaccaattattaacttacgactacttcctagacgaagttgaagaagtccgtcaaaaactcggcatcgacaacttctacttaatcggccaatcatggggtggcgcattagttcaaatgtacgctgctaaatacggccaacacttgaagggtgccatcatctcaagcatggttgatgaaatcgacgaatatgtaaccaacatcaacaaaattcgcgaagacatcatgacgcctgaacaattaaaattcatgcaagactgtgaagctaaaaacgattacgataacgacgaataccaagcacttgttgacaagttaaacgctggttacgttgatcgcaaacaaccattagctatctcacatttaatcccaacaatggcaacagacgtttacggcgtcttccaaggcgacaacgaattcgttgtgactggtaaattgaaggactggcacttccgtgaccaactccacaagattactgtcccaacattaatcacatttggcgaacacgaaacaatgccaatcgcaaccgctaagatcatggctgaaaagattccacattcacgtttggtgacaacaccaaatggtggtcatcatcatatgattgataacgccccagtatacttcgaccacttgaagacattcatcaaggacgtagaaagtggcaacttcaaagactagagtgctgactggcgtgcttagtaattgagcattaatacaaaaatcccattaatccggttttaggattaatgggatttttagattaagcggaaattattacgccaggaagcacgtttagagtgctaactcgaacgttttggctttgaggattaacagaaaaatggtaatgatggtgtttttcaaccatcattatcattttttagttaaccggaaaaggtagttcgagaagcacgtttaaagtgcgtttgaaacggatagcttctgagcattaacacccaaaaaagcacctaggatttggtgataatcccccgcagtcattgcctagcggattttcatcatagcttaggtgctttttactttttaaattaggcttgttgctgtgctttttttgaaaggtagttataaaaacaatccgtacttttgaaaagcggcattagttcctgattaatttcgccaatcatttctttaaataaagcttcaaaatcatcttccagctcttcaattaactgttcacctaatggtgttagacaaataaaaactttccgttgatcttcaatatcgctccgctttttagtaatcaatttctttttatagaggacattgaccttgcgcgaaatcgccggactcgtaatatcaaacatccgggacagctttgtcacttcaatactagggattcgctttagttctcgcataattaaatattggtcgtaactaagatcatggcttaccgtaatatgattaattttatgatagatttgaccaattttaaggtaccattcattaaactgatctacactgattgcagtgcttactttgtttgccattcaaaatcatccctttttattaacgttgttaaaaatatacttttgtaaaatacaatattagtaaaagttatcatatatattccaacttttaaagatatacgctcattcgttaaattaataatcctgatattagtattaactacgtttcatgtgaaaatgaagcgctatctatgctagaatagaattaattaaaactttcgatggaggtcattacatgaaacgcattacactctacttagttcgtcacggacaaactttcttcaaccgctacaaccggatgcaaggctggtccgattcaccccttaccgaaaaaggcatcgcagacgctgaactagccggcaaacaactttcaaaggtgaacttcgcccaggcttactcaagtgatcgcagtcgcgcgatggatacggctaagattattcttaaaaagagtttctacctcgatacaccctatacaatcacccctcatttccgcgaagaattctacggttactatgaaggtgaagattcagcgaaagcttggtacataactggcgctagccacgatgctaaaactttcaaggaaatcattacgaagtactcactcgatgcttcaaaagacttcatgaaagaagctgatccttttaacgatgctgaaaatgcggctgaatattgggcccgcgttggtaaaggcttcaaacaaatccgctcagaatgttcagatggcgacaacgtcttgatggttagccatgggacaacaattcgcagtatcgtcggcaaatttggcaatggtcaatttgacgtaacggttagcccgatgaacggtagtatcacaaaagtggtcctcactgatgaaggcgtcacagttcaaagctataatgaattaaccatttaaaatatcaaaagaagcgctgaagaccaatttggttttcagcgcttcttttattagtgttgatataaattaacgactgattgtctgatgaccatttctggatcaacaattttttgttcaacgtctgattgctcgccttcaacaatcgccattaatttagcgacacccatttcgatgatttgggcagtcggttttttaattgtcgtcaatgacggcgtaataaatttggcatatgccatatcatcaaacccgataaatgagatatcgcgtggaatctgataaccaagttcaacacaggcactaatcgcaccaaccgccatatcatcattctcacaaataacacaggacggaatattaccactcgccagaatctcccgcatcaattcatgtccactctctggtcgataatcgccgcctttaattagtgtcgggtcaactgcaatgccattcgcctcaacagcttgcatgaacccgttagtccgctgaacggatgattcgaacgaatcaacgccccggatcaacgctagcttacgatggcccatttgaatcgcataattagtggccaactcaccacctaatcgatcgccaatcgcataattattaatatcattccgctcaatcaccctgttcaaaacaactaacggcaaccccagattatgcacatattcaataaaatcataatcagatttagactgactaataacgataatcccgtcgtagttattaattgaaatatactgccctgccatcgctttggcgacactattaatcgaaagcgaataactcttgggcaataccgcttgcgcttgggccacaacatccgtcataaagctattagaagtccctgtttcaaggttggtaaagaaaatcccaatcatataagaccgatttgtcactagactcttcgcgttaatattaggcacatagccgatctccttggcgatcgctaaaattttctccttcgtggctggttttaccagctcactatcattcagtgctcgtgaaaccgtcatatgcgagacgtttgcaagttgtgcaatcgttcgaatcgtgacggttgtcttatcagcctttttcacgccgcatgcttcctttctgtacgctcttagaacattgtaccagaaatcattgcgcacgctgaatataaaaaagaagccgcgataattcatcgcaggcttctttcatttattttaaaaaaagtcgaaataatcgtgcgcattattataggcaatattttgaacaacacgccctaattctgcagcatcgtttggcacacgaccttgttctaccaagcggccatagaagctacataaaacacgtctgaagtattcgtggcgtggatatgataggaaactccgggaatccgtcaacatcccaacaaagtgtggtaagaggctctgtagtgcgaagacttgtaactgttgggtcattccttcggcggtatcattgaaccaccagccggcgcctaattgtaatttttgcgttgtcccaccctggaaacagcccatcatggttgccaattctaaccaatcattactgtttagtgagtagaaaattgacttaggcacgtcttcagtttgttgcatcttcgtgtagagtgcgctgatatgtttaacaatgtcaggttgtgtcccgacagcatcataacccgtgtcaggaccaattttagcgaacattgggcggtttaaatcacgatcagaattgatatggaattgcatcgtccagttgaattgcgtattgagtttcatcaatgcttctaacaacattgtcaaatattggttaatttcgtgttcactgagtgcagcgttattaatccctttagcaacaatcgcatccaattccgcttgagtcgcttcttcaaaatggtaagtcaatagcgaatgatccgataagcgcccgcccatttcgttgaaaaattcgaaccgttgcgtcaaagctgttacaatcgttgcaaaatcatgaatctcaaccccagctacttttccaagggtcttcaagtaaccaccaaaaccgtcacgatcaatttgcatcaattgatcagggcgcattgctggtaacgtcttaaagccgttggcagcttcttccggttttaataactgatggtagtgtaagtcagaagcaggatcatcagttgtgcagaccacttgtacatttgaattttttatcaattgacgtggtttgaagtcgtctgtttgtaagagttggttaggcttttcccagatacggggtgctgattccgctgttaaacgttcatcgatgtggaaaaagcgacgtaattccaaatgcgtccattcgtaaagtggattaccgtaggcattttcgattgtcttagcccattcgataaattttaaataatcatcgccatcaccggtgatatatttttcatcaacaccgttggcacgcattaaacgccacttgtagtgatcgccgtacgtcccttcgttcaaccagatgcgagtgatgttggtatagttcttattttgatagatttctgaagggttcaaatggcagtgaaagtcgataatcggcatttgcgctgcataatcttggtataacgtcttggccatgtcattgtctaagagaaaatcatcatctaataattgcatatcttaacgctccttcatcgtcatgttatcgttaacatttaattcgaaataaaaaagaaaaaccgcgcgtcttttcttcaacatcaataatatagcgctttcataagcggttgtcaatccttcttccaatccaaaaaaggcctgtcaagcgctttgaactgcgcttaacaggccttttttatttattccccaaatttagtttcttttaaaacaatgccccgatataaccacgttgtcaccacatagtacacggcatataacacgatgaaaatactgaatggaatccaaatttgattgtatggatcgatcattaattctttgaacatttgtaagccgaacaagacgtgcacgacaccaacaatccctggtaataggaataatgcgccgatttctttggcaatcgattgcttcaagaggccttgacgaacaccgattttagccaacatcgtatagcgtttcacgtcactagccgcacccgataaaattttgaacattaggcaactagctaacattgctaagaaagcaatccctaagaagaagcccatgaattcaagaccactgaaaatgccgttagccatcttatagctggcatacttactgctgtcagattctgggttagccttcaactctggattggctttgagttgttcttggtatagcttcttaatgacaggtaagttagcgctaaagtcttgcacatcgtaggttttaacaaccttggttggtgctacaatttgtgcaaaggcctcattagaaatgagtttaactgctttagccgtttgacttggtacttgaattgatctgaagagataggtatcccctgtttgaagttcgctcaatggcactttgcggaccttcgtttcagaagaaacactacctgtcttaccgtattcgatagttaatagcggcgtttgtttaaactgctctgttcggtaataaacggttttgccatcttctttcacttgatacgtcgccgtttgtttaatccccttgagatttttagtcagcgtcaaagccttttgtgttggttgatttaagaccacatcataggcagatgccgagtcagcaatcttgggaatttcattttgataaccaattccgaccgtaatcgcccctaatgcaagtgcaaaaagcatcgccactaaagccaacatttttgtgtaatccttaattcggaaactcaattgcgctaacgtgaagttattaaggcctttattgcgcaacttttcattgcgttttaagagcatcaataaccaaccgaaaaaggcgttaaataggaagtacgtacctaatacaatcgtgatcagtgcaatcactaatcccataatttggaattttgcgattgcaatcatcatgtaataaccaaccgctaagaagacaaggcctaaaacgatttgaattaagcgcgtaactttattttccttaatgcggtttggttgttgatcatcatggagtaattgtaagacaggtgttttcaataattgatattggttaacaaccgccgcaatgatgaataaaacgatgaagaaaatcaaggtggtaatcaccgctggtaagtagagtggtgagaaatgcttgatatgcatgtctaatcgagaaagtaagaattggctcacaacttgcgttaacccaatcccaatcgccgtcccaattaacgtggcagccgtcccaatgacgagcgtttcagctgcaatcaattgggcaatcttgcgccctttggcacccaacatcatgaacatcccgtaatcacggcgccgcatactcatcaagaaactattggcgtagataatgtagaccagtgtgataatgccgagtaagacggaaccaatttggaagacaatcgctgccatgccaattggggaattactcgtcacaaaatccttattagtcgctaatgcttcgaacatgtaaaaaatggcactcgacataattaggcccgaaaaaaggactaaatagtctttaaaccggcctttaatgccggttaatgataatttccatagcatatttagtcttcctcctagtgattaaatgttcctaatgtatctaaaacttcttggtaaaaggcttcacgtgttttgtcaccacgcactaattcttgtccaatttgaccgtctttgatgaagagaatccgttggcaataacttgctgagaatggatcatgagtcaccaataagattgaaacgcgttgttcttcgtttaattgggccattgtatccaataattcacgggcgctcttagaatcaagcgcaccagttggttcgtccccaaaaagaatggctggattatgcactaaagcccgggcagcagccactcgttgcttttgtccacctgataattcggttgggtacttattcaaaatcgcatcaattgataacgttttggcaattgttgtaattttttcgcggacctttttaccagtcacgttttggagcgttaatggtaatgccatattttcgtaagctgttaaattttcaagtaagttaaaatcttggaacataaagccgatttcttgagctctaaagtcagctaatgcattgccttttaagcggctaatttcttgatcgttaatcttcacttcaccggcggttggtttatctaaagttgataggatatttaaaagcgttgttttccctgaaccagaagcacccataatgccgacgaattcgccacgttgcacatcaaaggtcacgccttttaaagctgtatattgtttttcgttagctttaccgtacgttttttgtacatcttttacgctaacaactgttggtgtatccatagttaaatgcctccaaatttcattaatacaactagtatatcggattaaataacttatcgcctgtttttaaaatgacaattcgctagattaaaataacaagtttgtaaggttcactttttaaaaatttcatgtgaaacatcaaaaaaattttgtcttcctaattatctttgactataatagaaacattgctattttcagaaaaggggtatttttgtaatggatgaaattgaaccaaaaaagaaatacattacctggcaagtcctcgctttaatggattttgtcacggtaattggcttcgatgatattatttataactttcaaaaccaagggatggcggttgtcttctcatggatcgtgctattattcgcttatgtcttaccttatgaattaatggttggccacttaggctcagctttcagtaaagatggcggtggtttatccagttggatgcgccataccagtggggatgtttggggttacctcactgcttggtgttactgggttgccagtttgccttacttagtcgatgttgccaactcaatggtcgtttccttcttctggattatcatggggaacggtaatattgaagataagttgtcacgggcgacatttgcgctcttaacagccgctatcactattttattcatcttcttccaacataaatttacagcgtcactgcaagtcctcagtattgttgggggtggcgcaatgtttattatgacgattttattcgttctcatgacatttgccggcctatttaacggcgcccctatcgccacacaaccaatgaactggcatacttttattcctaaattcgatttacattacttctcaaccatcggccttttaattttcgccatgaacggtgccgaattagtcgcaccatatgtcagcgaaatgaaagatggcaaaaaagatttccctaaagccatgatggccctcgctttaatgacagccttcttaacaatctttggttcatttgcgattggtgttttctttgatgccaaccacttacctaatgatttaaaaatgaacggttcttactacgcgttcttagcgctaggtcaacaattccatatgggcaaagtcttgctctacatcttcgccgttacacaagccatctacatgggcgcgcaactcgctatgttactcgatggtgggacccgaatcttcttatctgatactgctaagaagttcttacctaaggccctcacaaagactaacaaacaaggcttaccaatcaacggttactggttaaccactgggatctgtactttcgtgctggcttcaagtgccttcttacccgccatcaacgatatctttaattggttgttgaatatcaacggcatcgtctcaccatttgttacttgcttcatctttgtcgccttcttacgggtccgcttcaacagcgacaaatacccatcagaatatacgtacattaaaaacaaaccttgggcgattattgttggtttctggtgcttgcttatcaccgcattagggacaatcttcagtatcttcccacaggatgccacaccaggcacttctaaatacacccacgaattgatcttaaacgtcgtggtttccgtttcattaatgggcttaggggtcatcctcccattaatcgctaagtatcaacgaaaaaaaacagcttaaataaaaacggctaagacctgtgattttacaaggtcttagccgttttttatttaagcttgatgatatttcttttctaagtagtaatagattggtaagccaatcaatgtgattcccaacccgattaaggctaagatcgtttgcgtgaataaggtgttaatcacaataaacgttccccctaaaatcgcgattaatgggactactggatataaaactgctttgtaaggccgtttcatttctggttcgcgtttacgcaagataatcactgcggcaaaggtcatcacatagaatatccagatgacgaagattaacatatcggtcaatgtgttaaaaccacccacaaaaatcataccgatcgcaatcactaattgtaaaatcccgcataaaattggaatgccagcttttgataagcagctaagttgtttgctaaatggtaagtgttgttcagttgccatcgcatatggcacgcgcatcccggtcattgtataaccgttaattgcaccataaaccgaaactaagatcccgatggttactagcttgccaccgaaaccgccgaataaatgaccagctacttcggcagcggcattttcgttaccagcaatctgtgagattggtaagactagtaggaagactgcgttaactaagaggtaaaccaccattgttccaaaaagacctaacaaaattgattttggtaaatctttttcaggatggcgcatttccccggcaatattcccaacatgaatccagccatcataggcaaataacgttgctaataccccattacccaatgctgataagacattattcgatgtacccgttcctgctacagtaaagagtgaaacgtgacttgcgttagtccccgggttaattaacccaaaaataataataatagctaaaggaattaatttaaagacagtcgtaaaggattgaacaaagccacccacacgacttccaaagaagttcataattgttaaactcgttgcgacaatgactgcaaccggaatttgccagctaggcgcccatccaaataaattcaaacattgtgtcgcaaaaataattgataatgcagcaatattggccgggaaataaaccgttgtttgcgcccaacctagtaggaaggctgcaacactgccataagttttctcaatatagcgcatcataccgccggtttctggaatcgcagctgccagttcagcagccgttaagcccgcacaaatcgtgatgataccaccaagcaaccaggccaacattgttagccccgttgaacctgtgacttctgttactgatgatgctttaaaaaagacgcctgcgccgataacagtccccattactgttgataaggcggccgtaaagccgactgttcgatttaattcttgaggtggtgtttgcgttttgatatcaatcactcctttctaggtataaaaaaacattagttatcatattttaaactaaaataaatgacagttaaagcattttctgcgggtaacactgttgaaaatcaaccaatgctcccattaggttagcatcgtcttgatactgactcgctaaaagtggtgtctcaaatggcgccagctgaacttgcgttaataatttgcgacgttcaatttcaatatgggggactaaaaaatcaatcttttcaagaccgccccctaaaataatggcttctggatcaaaacaatattgtaaattataaatagcttgcgctaaatgttgataaaaggccgtagtcacttggtgtgccaaagaattgccttgtctcgccaaagcaaaaatttccgttcccgtcagtttagcatgggcttgttgattatattgttgcgttaaataagtaatggttcccacctcacttagcggataaccatcagacattaacatcgcaccaaattcaccactaaacagatgcgagccatgttgaatgtgtccatcaataatgaccgcacccccaacatctgagtcaatcgccaaatataaaacgttctgtaagccctctgctgaaccactgcctaattcggccaaggctgcacaattaatctcattttccataatgacgggtaatccaaatcgcatttctaatgcactttgaatttcaaaattatgaatgtacgggagggcactggcaccttcaataatcccagtcgctttattgactgccccgggtgtgctcattcccacgccgacgatttgatctgacaattgatatgtccgaacaattttggtcaacgctgcataataagcatttagcgatttaggggtcgcaaccattccctgctttgttaacttatgagcagtaccatcccataaggcaaatttaatggttgttcccccaacatcaatcagcgctaaattagccattctccaatcccccccaattattatttaagataacaattgttaacttttgaacttaatcaaaaagttaacacctcgctatttgtaacgctttcattctaacataaaataccccataccgctattctacttagaatggacaattctattgctttgtccgctgtgtttcgcttcggtaagcgttatcattgaattgtgaaataattcaaaataaggagccccatcattatgaaaacaaactttgattttttaatgcctagcgttaacttttttggccctggcgtcatcgaaaagattggtgatcgcaccaaaatgttaaatattaccaaacctttaatcgtgactgatacttttttagaaggtgttcctgacggtcctgtcgcccaaacactcgcttcattggatcaagccggtgttcaatatagcatctttaacggtgttgaacctaatcctaaagaccgcaatattcaagccggcaaggcgcaatacctcgctgatggttgtgatggcctcattactgtcgggggtggttccgctcacgattgtggtaaaggaattggtatcttgctcactaacggtgacgacattaccaaattagctgggattgaaaccttagaaaacgccctaccaccactattagcggttaatacaactgccggaacaggttcagaattaacccgccactgcgttattacaaatgaagaaacccatcttaaatttgtcgtcgtttcttggcggaatattccgctcgtttcatttaacgatccaatgttaatgttagatgttcccgctaaattaacggctgcaaccgggatggacgcctttgtccaagccatcgaaccctacatttcaaccaaccgtaatgcgattactgatggccaatgtctccaagccatcaagttgattgaagaaagcttgcgcgaagctgttgctaacggccataacatcgaagcgcggaccaagatgtgcgaagctgaaatgttagcaggcatggctttcaacaacgctgatcttggttacgtgcacgcaatggcccatcaattaggtggccaatatgatgcccctcatggtgtttgttgtgccctcttattaccaatcgttgaagaattcaacatcgtcgcttgtcccgaccgttttgcagaattagcacgcgcgatgggcgaaaatacggatggcctttcaacaagagatgccgctgaacttgctatcaaagggatgcgccaaatggcagccgatgttggtattccaactagcatcaaagcaatcggtgctaaaccagccgatttcgaaatgatggccgaaaatgctttgaaagacggcaacgccttttcaaacccacgtaaggcaactaaagcagaaatcgttgcccttttccaaaaggcatatgacgctgaataatttaaataaagccaatcgtcttttactgacgattggctttttaattgtttcatgttacacttaacgggaaaacagccgttaaatcggccgttttaaccaactagattttttaaaggagcgtcaacaacatgtcaactcaatttgatcgtccaggtttaataattgaataactgtttggtctttttttaagggcgcttctattgactctatttttataatactgctaattaacgataagaagctgcttaccagcttcttttttaatgcagaagattcccttaaagagggccaacttaacaaaaaaggagtctcatatgcaagaaacaaaaatggcacaaaaacgagtattaattactggcgttagcaatcgccaaacaaactttgactacacaatgcgtgaattaggcgaattagcccgcgctgataacttagaagtggttggtgaagtacgccaaaacatcgatcaagctagtcaccgaacttattttggtaagggtaaagtccaagaaatcaaggctgaagccgctcaagctgacgctgatatcattgtcgttaacgatgaactatccccttcacaaattagaaaccttgaaaaagaattagaaatgagtattctggatcgcactcaattgattctagaaatctttgcgagccgcgccaagactaaggaagcccaactacaagttgcgattgccgaagcaaaatatcaattaccacgtttacacccttcagaaaacaaactggatcaacaaggtggcggtggttcaactaaccgtggggccggtgaaacacaacttgaattagatcgtcgtttaattgaaaaacggattactaaattaaagggtgaattagcccaaattgatcaacaacaagaagtccaacgtcgtcaacggactaaaaatgcggtccctgttgtagcactcgttggttataccaatgctggtaaatcaacaacgatgaaccgtattttacaacgtttgaatccagacacacctgaaaaacaagtttttgaaaaggacatgttatttgcaacccttgatacaagtgttcgcgaaattgttcttcctaacaagcagaaattcttattaagtgatacggttggtttcgttactaaattacctcatcacttgatccaggctttcaaatcaaccttggctgaagccgcgggtgctgatctattgattcacgttgtcgattattcagatcctaattacctcgatatgatgaaaacaacacaagaaacgctcgactcattaggtgttaaggatattccggtcattgaggcttacaataaagctgatttaaaacctgatacccgctacccagaagtcgatggcacacaaatcgtttactctgcacgtgatgaggttgctattgatgctttaatcgcgctcatcaacaagcaactctttgaacaatatccaactcttgattttctcattccgtttacagaaggccaagcggttgcttacttaagcgaacgcgccaacattctggaacaaagttatgaagaagaagggactaaaattcgggcacaaatcagccctgatttactaggtgccgttcaaaaatatgttcaagaataactaaaaaaatagcgtcgaaaacagtaattgttttcgacgctatttttttaattattgatatttttgaaaaactttatccgctgcttgcataatccgttgcacatcagccgaatcaattttaggggcgattactgggccatcctgttcataggcacttgaaatcgcttctaaggccttttgcgcacgtggacttaacatcacgtattgttttgtccgttcgctatcgcgcatccctaagagccagccagcatcctttaaacgatagaggtcttcttcaaccaatcccgcactgaatacaatttgtgcatcaacatatcgacccgttgtcatctcattaatccgttgtaataagatagcatcgtctaaactgatattaacgtcacggcaaatttcttctaggtggtcaaaataactaagacttgccataccggcttgaaccgttttaatcatttcgcttacaggatcttttctatttaggtaatatactgacattttgataaccccacttcgttcggtattaacaaccttacttgattatctttattctataccagcaggtagcgaataaatctcggggtttttttagatttgaaaaatatcgcgaaacaatcattaatcattagcatcaacaatttttgaaaagttgtaatagtttgattagcgattggttatcgtaaagacaatcggctttttaagcgggtcatagcccttagttgccgatacttgcaccaaacggtacgtatcaggatcgagatgtgtgatgcgaacttgaccatgttcatcgctcttcaagttttcgacaagcactttaccactttgattttgtaattcatatttcgctccaaccaaagcttggttcgtattgccatctacttgatttacaatgactgtcccttgtgactgatgactttcaatcgtcacttgtttaagttgcgcatcctgtttaatctcgatgatttgatcgttagtttgtttttgatagccaggtgccgccgtcaattgtacgagtcgatattgaccaggtgtgaggtcgtcaactacgacttgaccagttgcacccactacaatttctggccgaaccacctgaccagctaacgtttccaatcgataagttgcaccagcaatcgctaactgcgttttctgatccctatcgatcaatacaaaactccccaatttaacatcgggtgattgttgctcagccttaatggcgaccgttgccgttttacgatccgtaatggccacctttgtcactgccgaattaatttcgtacccagttggtgccttgatttcttgaacagtatattgccccactgctagttgggtcaatttaatctgtccttgactatcagtttgataataaccgacttctcgaccgctttgatccttaacctcaaagtaggcctttgcaatcggtgcgccctttttagttgtatgcttaatcagtaactgccccatttgtgcttcatctgttaccgttagttgtgttgctcgcggtgatttttcagacaacgctacaattctaggttcagttgctaaccggtaaccaagtggtgcttccacttcagttacgcgatagcgccctggtttttggtccggcaactcagcccgaccggtttgatccgtttcaactttagtcatctgaccagttttcagtgactcgactttaaagacagcacctgataaaggttgcccttttaagttagttttattaatcgttaaggtttgcaatggcatctcaattcgattagcttgtaattgtaactgattttcaccataacggctgacatctaattgactttgatcaaacgacaattgatacccggtcggtacttgtaaaacctcaacccgatagtgccccgtacttgcattggggagtatagcctgtccgaatcgatcagttgtcaattcccaaacggtctgaccttggtcatctggttgatcggcagttagtcgcagtaaaacaccagcaacaccttgaaagtgattatctaaaatctgaatgcgcaatggactgattggcgcagtcacttcacgtttatcagcaaagcggacttggtataaccgtttttcatgggctttaatcgtcacaaactgaggtgtttgatccaactgatagccagttggagcttttgtttcctgaatctgataccgtcctgggttcaactcagtaaagtgtagttgcccggacaccgtcttttgcatttgtgtctgaccagttgccaaattagttaatttaatggccgcatcgtctagcccttgcccttgttgattggttttatgcacgataatttgctgtttttcagtcacttttagccgctgattatcaactgttacttcagtattttgtgccccatcagcacccacaatcgccgtttgaatcgctgctagtggctcgtagcccgcagcattggcaatttgctcgtaagttatttcgcctgttggtacttgcttaatggtcacttcaccatcttgattcgtcttttgcgaaacaaagacagtttgaccgttatcagccggcgttgctgtcgttaaagtaaaagcagcattggctaacggttgatgcgttgcggcatcgcgaactctaaaagtaacatccgctaccgttcgttgcaattgccaatctacagtattctgatggtcgttactaattgttaatgactgaacagcagtggctggctgataacccgccaccgttgattcttgcgtcacttgatagtcgcctactggaacagctgccaaagtagctttacctgttgccgttgtcgtaactgttcgctcataactttctttagaacccatcagtttgagctttagttgaacgccagctagcgcttttccttgcgcattagacgcattcaaagtaacgtcatgtttcgcatccgttcgttgtatctgatgaacaaacgaaacagctgttgtttcctgatcgagggttatttcctgggaaatgttagccaattgatagccatccggtactgcaacttctcgaatctgataacgccccgcgggtaattgcccaactgttacctgcccgttatcatcagtttgaacggttcggtattgttcattagccatcgttgtaacacgatagctcacatgtggtaaagctattccggattctgaaagactggtaatcttcaacattttagtctggctaattgccgaaaaattgacctgcgccgttttatctttagtaaccgttataacttaatcattagcgcctacaacactgtaatgagggatcatctttgtaacggaaacgcgataatcgccagttggtaagcttgtccaattcacctgtccatgattatcagtcgttccagtcttctgataagttgcatccttaattgactgtaaatgtagctaaacaccgacaagcggatcaccagttgtttggtccgtaactgttgtcatcatctcacctttggtcttgccaaaatcaaccgtcgtcgtcaacgattgattagcgctaaccgtgacagtcggtgcccactgtggttcactactatctgggtggaaaatcactttcaattgataacgtcccgttggtaatgtcaacttagtccaacccttgtcatcacttgctggtgccgtgtaactttcatttgttttttgattaaccgccattaaaacaacaccagacaccggtgtgccgtcttgtaattgcgtcttaacaactaagccgccttgactcgcatcagtatagtataagtgatagaaattagcttgatccgcagcaatttcaattagttcattagatttttccaattgatacccagttggtgcagcaattgagctaacgtgatatttcccaggcatgatgccacgaacggtattccctgttagtgtctcaacgactgttttgaaaaaaccacgattatctgaacttaacgtatagtcgtatttaccattctctgattttaaattgattttagcattgggaacagcttgttcattatcatcaagcccacgaattacaaaagattcaattggtgattgcttcttagtatcggttgccgctgctaatgcggatatatcaaaaaggctcagcattaggctaacaaccgtcagaataaccgttagtttccgaaaataatgctgttgcttcaattctatcacctcattcaatttcattttgaacagcgtataccccttgtcctgctagtgcaccaaagaccgccccgacttgagttgttgcgccgccagatggtgtattagggctcatactttgttggaacatcgcgatatctttttcaacttgagcgtgatgcttcaaaaaatctgcttgttgttgatcttgatttgcattgtcttgcccttgttgatttccatgttcttggatgcttgcattagcatgtttcttaatcgttttttttgcgattttatgggtatttttagctgtattagcggttgttgcctcagcagctttagcttgatcctgggtcgtttgcgcaacggattgcgccgctgttgatttatcgcttgcattagtcgctttttgagctgcacgttgttgctctgctacttcttgcgtatttgctgtcttagattgatcctgctgtgctgcaggaacttgttgggccgttgttgtcgattgattagtcgtttgttgatcaggttgcgtctttgaaactggctactctgtttgggcagacgaacttgaagactgtgagtctgatgatgactcaatcacctttgtcggatagtttttaaccgtaatattcaattcattacccgttaaagcgtctgaattttcttttccaacagcagtatctgctgctgatactttttgaacttgttgcatcaaaaaagtttgtgaaaaacgataaacgcctaaactaagaattgttagggcgagaatctgcttgcctgatttcatagtttcccctttttaatcgcgaccactaaatccccaaattgctgccagttcaaaatagtaggcggattcttccaaattaattgttcacaggtcaacgtgctcgagtaaaaatcagataggtagaggtcggtccgttcatcaacggtcgtttgcacttcgatattcagattgttaaagtagttgactgtttttttcatatactgattatagagtctaccttgtgagaaatccacacaaatataaacacgatcttttaatatttcgagcggaatatcttcaatacaggcaaacatgtaatcataatacaaactcgcctgtttacgccaatccaaatccgtttcttgtttggtcgtaaacgtcaaaataatttgatgaaatagtggatttgcttctgcaaaataggtcaattgttgttcatcaataaaggttgttggttctgtgtaaaaagttagatgctttacatgaatttgatctaaatcatgcgctaagttagccagaatattttgagcttgttcactatgtgcttcatctttcatcaagacgtgctcgactttgttaacaaattggccggtcttttgcgatacaccatttttaaggtccggtgttaaatagtcaatttcaagtggtacataactttcggtaaataaaaacgtcagtagaccttctgcttccacttctagcggaattcgtaataactgatagttagtcgtcagcatactcaataccggctgccatagttgcggttgttgcgtcttaaaatcaggcgctaataaggggtcagttaacgcgttttttccccgtaatcgtagtgattgtaccttgagataagtctccaactttgtaattgtcgttggtagtagattaatctgaaactgatcgcgcatcgtcactaacatctggtcgacagtttcttggaataacgccaatgttttttcaatgccattaaagtaactataataaatttcaaaaacaaactagcgaatctgcatttctgggccaatcaactgattttttttgaattgaagattaaaatgatctgcgacttctaccatttccttccgcaattcatagaacttagttttcccaatgaataaagcatcgcaaaagtcagtcgtttcatttttgcctggattcaataaactaaattcaaacatcttgaataaattggattgttgtaagtagtctagtcgaattttacggacgattgattcactgatatggccactttcaaagatgccatccccattaattctcaaataactctcagggctcatcatcgctaaatccgcattaaccgtctcaacatattgactaagtttgaacttagataagcccaataatttcatcgcacgatttactgttagatagtaatccccatgatcagcgactaattctaataaataatattgataacgataattcaaatctagaaattcattatggatttccactcattttcctccagattagatttaaactcttttttgataggccatttgaaccattaattgataaggatcactgccttcaacaaccccactacggccagccatcttatgtggtccaccagtaatccacgtgtgggcaatcgctaattgataacgatcggttaattcctggattggtgtgagccccactgatttgataacagcaagtggtgccttggccatcgcgttaatgccaccatgaaccacccactgaccgtcttcttgtttaagctcataaaacggcaaggccactcgttcaccaattgcataaattgggcgttggaaatgttgtgcttgctcgtaaatatcggcatctgccaacccagcgtaatttaaactgatatagccggcttcaattaattgtgcgactaattggtcgagttgttgttgatgcgcactatcgacttctagttgcgctggtagcaaatccttctcttcaaataagccggttgctggctggacttgtgagatgattttaggcttagctgtttgtccagctaagggatgtggcgcagttggatcgccacccagcgccttttcgacgtatggtgacacatcgacaaccgcgttgcgaccacgataatagaaataaagattcatcactgcaaaatagagtaatactaaaaaaacaattagattaatcacgcctcgtccaattgcttgtgctctaaagtagtagatgctcttatatagtaagtaaaaatcaccgattagacagataattgaaaaaattcggtttttaacccgattattaatgtttaagtagccaaaataatgattaacgatatccaaaaaagataacattgcgcattccgcctttcaatattaacagcagttcgttattgcgttgcactaccgctagtgaccttggccacgttttgggatgtgcctgttgatgacgctgcactactgctgttattagttgttgtttgagtatcacttgttgtatcgcttgaatcagctgactcgtcgttttgcgttgtatcagtcgtctcgcttgagctggtttccgtcgtattatctgtacttgattgttcttgatctgacggcgttgatgttgattccgagctgcttgatactgattcttccagttcgctagatgattggctgctagtcgtctcatcgctttctgaacgactcgctgattgactactgcttacactgctttgtgagctttctgaaacggaagtcttttgctccgtcttaatattagcgaccggtttaacagtattaacaacgacgttcgttgcgctcattgcaataattaatgaaataatcgctgctgggggcacgattgggggcgtatgaaatgccataacactcttccttcctatctattcattttcttgacagtcttcacaaagaccgtataactcaaattgatgtccttcaacttggcagttggggagttgatcactgaagaaatccagtggacacatcttcaactcaatcaccttgccacagttacggcaaataaagtgatgatggtgacgatgttcaaaatcacactgatacttcacatgagcttgtccgccttcagtttgttgctcgactaaaccgagctgctcaaagtctttaatattgcgataaatggtatcatgactcatccctgggaaaatcgcccgcatatgatcgtcaatttgggtcactgggatgtaatgattttcgtactgcgctaaataagtcaacatttcgcgacgttgctttgtgatcttaaatccgtttgcttttaaaacggccagcgccgtcgtcatttcactcattttaatcggttcctttcttaatacctgctattcagaataactgattatagcattaatcgtcgtcattttagttttaaatggtttaattgctacacactattattatacgctcttataacggtccgtgatgaaaaacaatttccccttttaacaaattttaatcaaactcgagtaaaaatagttgcaattaacccggtcaagcgttatgataatactcagatggtttttaggaaaccgtcttcattggccttctaccagtgttttagttatttgaagggagattttaattatgcaattacaaaacaaaactaataattggtatcatgtttcacttgatacgcaaactcaaaaatttatcgcaactgcaacgaacaatgaaaaaatcagtgcaagtggtattacaattgaacaagctgtccaaaaattaacatttaaagtgaaacaacctaaccgtgcaaacaagcgacaacttgcttaagcactaatcgttaaaagggaagcctgacaaaacaacgttttgtcggacttcccttttttgttattgacgtaactgttcaataattgtcgtcaatgtcttttgcgtttcttgccagtcatcattcacaataatctgtgcttgatcatgtaacggtcctgaaaccattaaatcccgtttaaattccgcactcgcaagacgtttttggattgcttctggtgaatcattacgcttttctaagcgactaattaaagctgttgcttccgagaccgttaaaaataagacggttacttgtttgccaaaggtttccagataggtctgagcccctttggtatcaaccactaaactgatcaatggggacttcgcccaagctagctcaagcgcttcatgtgaagaaccataatgatagcctgaataagtcactgattcgattaaatgcttctgtgcaagcgatgactcagtctcgaaatagtaatccacaccatcgacttcgttatgccgtttaggccgcgtcgtatgggttacgacttggggaatctgatacatttcggttaaccaatgactaaccgttgttttaccactaccggtggcgcctgtaatcactaataactgtttttctaccatttttatcccacttctcatctattttaactaaaaaagtttgacccttccttctcagggagagccaaacttttttctgtttaatattaattgcttaactaaatccgacgaccaaagtcaggtttgtaatattgcattgacatggttgttacgctttgaccaggtgctggtgcatgaacgtatgaaccgttaccgatgtaaatcccaacgtgatgtgctgaaccaacgccaccccagaaaacaaggtcgccaggttgtaattctgataatgacacttgtgtcccaagcttgctttgttcttgtgatgtccgtggtaagctgataccagccatcttagctgcatacatcactaaacctgaacaatcaaagccaccaggttgtgcaccaccccatgcatatggtgtaccaataaattgtagtgcgtttgacactaatgaacctgtgttagcaactggctttgttgttgcttttgaggctgagttactgttgttacttggtgttgttgcaccagtattattgtttaaaactgattctgtcttagctttgtctgatgattcgttcttaatatcgcttgatgttgattctgattttgttgccgtttttggtgcttcagctttagcggctttgtctgcttccgcttgttgtttagcggcttcaacagcggctgccgtttgtgaatccaattggctttgtaagttagctaattgtgttttatgaccttcaacttctgtttcaaaacgcttttgttctttttcagcgtcatcttttaaagtcactaatttagcttgatcagcttctaattgtgatttagttttaactaaatctgcctttttagtttcttgcgttgtttttaaagttgccaatgtactttctgaatcactaacagctgtcatcgcttctttgctggcttggtttaacttaccaacaactgacgcacgactcatcatatctgagaagttatcactattgacgataaaatcaacatagacgttccctgagacgctgttacccgcttctttttgaagtgaaacagcttgcttcttcatcacgctcttacgggcttgcacttcagctttagctttttcaattgattgatcaagtgcaacgatttgttgatcagttgacttgatatttgctttagcatcatcaatggcaatgaccttgttagaaacttggctattgatttctgacactttattttgagcatcgtttaatttcgttaacaaagcggcattttcagcactagttttcgtaatggcagcctttgtatctgttactgaatcggcactaacaacacccacgctcatcgcaattggtgcactgattgataacatcgctaacgcactgaccattaacttacctaattttttcactttgtccactcctgtttttaatataattaactacttaataccgtccatatttcttatccgtttatcagtgtatcatctgactgttacaggactgttacaattaaattactatcacgagtcgatgtctgctatatcaatgtttttaatcactaacaattgctgaatttgcgcccattgcgtctgaccaattaagacggcagtttcatctccgtttgcgtcaactacttcataggataacggcttaacattcacctctttgacaatttgattaaacatctttttggcatagagcgcctgaatttttttagtttccaaaataaccacctcatcattcattttaattaagcttatcataagcctgtttaattgtgtttcaatcgctttcagcttaaaatgaaaccatcttctaggaaatggggttttaagatgcaaattacaagacatgatcaaccacttgagacaattgggacaccacctaaagtcggtgagcaattacccgcttttgaattggttgatgcagatcaccaaacacgcacaacccaacaattactgggcaaacgaacattgattagcattgtgccagatatcaatacacgtgtttgcagcattcaaacaaaacactttaatcaagcaattgatcaatttacagatatcaacttctacaccgtttcaacgaataccgttgaacaacaacaagcctggtgtgccgctgaaggtgttcaactgatgcaactcctctccgatgaagccttgagcttcggtaaagccctcaatttatacgttcctagcaataatacgttgcaacggtcaattatgattgtcgaagcagatggcacaatcagctacgaagaattaatcgttgaacaaactgacgaaccaaattatgcagcggcactcgaatttttaaaatcagctcactaattaagtgaatccgctcaaagccacaccaatgttggtcgtggtttttttattagcctgattgttcaacctatcacgtgagcgatgtgataggttgaacaatattgctttaccttgatgcttggcgtattatacctataccagttacttaaatttaaacttgaaggagtcgcaatgacgacacttagcaacgatctttttcagacctttaataaagtcattcaccactatcgccattattacggtatgcaattttcatcgcaccataaatctgtcagtcaaattcgcattttaaaactactccatcaacaaaatgggcaaatgcaaagcacgcttgctcaaacgttggcgattcggccctcttcgttgacagagtgcctcaataaactggctgctaaagactatattcaacgtcaatctgatgaacatgacaagcgtgtgactcacgtttttatcacaccagctggtcgtgcgattatccaagaagcctttgatggccgcgatgagtttacggaaaccttatttagcagcctttcaagtgaagaacaagcaacgcttaatcagctgctcaccaaattagaacacaccttatcagatactcaaaatttcgactttatggctgaattcaaagaacgtttacaccatactaaactttaaaaaagcactattttaggaggttctcatgcgtaaaatattagaatattctctggcgggggttttatcttttctctttagtagagccttcattcatcgcatcgttttacccacactttggggttatccccgcttaacccgtgtgatggctagatttcctaagacgaccgtcctattaattctctttttgaccctcgcgctctggttaggctggattcagtgggacttaaagcgcctttcaccgatttacggatacttgatttatagcgtctatctcctgctactcttcatcgtattgttcacaaaagccagtgtttaccatgctgtcagcctgaatccatttgattttattagtcatgatcgccgtacaattctggaggccctattaaatgtcatctacttcatcccactgggcggtctctatagtttaaaagcggatttcactgaaaccaacattatcgcattgcttaccattttaggaattgaaattcttcaatacgtcttttacttagggactttcgctatcagcgatatcattctcaactgggtaggttgtctaatcggctttactttattcacgattggcgcccgccatttcaaacaaacgattaaaactaacgcataaaaagagcgcaggacaaaagttattttttgtctcgcgctctttttttagactagtaattgttgataaatttgcttactcatcgtgaccaacgatggtgttgatttatattggttggataataaaataatccctgattcaccattttgggacatctgaacatgactttcaaagcctgcttcaataccgtgactagtgaaataatcgcgataattataaacaccacctgaatattggccattattggtgtgccgtaattgttgtaagtacttcgacttaaagaccttaccttgcacaattgcctcttcaacttgatacaagctgctagcagtcgcatagagattacccgtcccaagttcccgtgtatagatataggccgggtcttcaatttctgcaccgtatgccccatttttttggtaggcataagccgtcgcatgctgtggatccgaaaagtttggcatgaagttaaaggcctgaacccccaacggcgtaataatctgttgtttcatcaaatcattgtagcttttatgtgtggcttgctccaaaagccccgctaacaagacataattgactggcgaataggcatgttggccaatctttttaacctgcaaatgtttgattgcaaattggagacgttgtgcatcagtttgaacaactttaggcgcgctcgtttcaaaaagccctgaacgcatatccaacatcatttgtaatgtaatctggtttgctttgggaatttgtggataaaagcgactgagatgatccgtcaatttcaactgaccattttcaacagccttcatcacgagtgccgcagtaagtgacttttgcaccgagccaatttgatacgtcgttttgggcgtcgtaaattgttcgctattcgcgtaaccacggccaccttgataaatgacatgattatggcgaacgattaaaatggtgccactgaaattattatctaataattcttgttttaaatatgcctgctctggcgtcgttaattcattaaccacccgatcatcaatatcatttttattgactttggcacgctgaatatctaactgctttttggttaacttcaattgcatttgcgtattagccaatgcttgcccctgtcgaccaaattgtcttctaaaataaaaggtcagactgacacctaatactaaaacacaaatcgtcaaggcaatattaattttctttctcttcatccgtttcactacctagtgctagtcttcccttcttgagtactgttaaatctgtgccaaattgataataaagcgcttcaccgtttgcgacttccacgccatcaatggcctgatctgaaatttgttcgataaccttaattaaggcacgcaaagtcgagccatgcgcaacaattagctgatcttgcccagcaagtaaccccggcaccacttgatcttgccaataaggtaataaacgttgggtggcttgcgccaaactttcgccgcgtggtcgactcttacgtggcactaagcgatagcgacgcgcagttgatgaccgaattaaaagtggcggcaccgctgtataactgcgccgccagcgcgctacttggtggacaccaaaaacggttctcgtcgtgtctttgttcaagccacgcaaagcaccgtagtgtcgttcattcaagcgccaactcttagtcattggtagcgccaattgatcgagttcttctaaaacaatgtaactggtcaaaattgcccgtttcaataaagacgtgtgcacgtggctaaattgaaagccagcgtcttttatctgccggccaacttgatgggcttgctgtcgcccttttgacgtgagcgccacgtccgaccaaccggtataggtcttcagttgattggcgacactttcgccgtgtctaacaattactaaattcgccatttttcaaactcacttttcacgtaacttaaggcctaattcaatcgaccgatccactaagacggattgtgaatcaactactggaaaatcatggtcaggtgcccattcttgtgccagtgacaattctgtacaacccaaaataatcgcgtcgcattgtgtttgcatctccgctagaatagcatgatatttctcaggtttcatctgtgattggcccttgatatcattgaaaatcaaatccatcgtccgttcttgcaaatcaagactaggtttcaccacttcataaccttcagctaacaatgcttcatcataaatcccatcagtcacagtccctttagtacccaaaataccgattcgtttagcatctggataggttgtttgaatactcttgaccgtttcccgaggcatatgaacaatcggtgctgaggcagctgcttgcaagtcgtcgtaaaaataatgcgctgtgttgcaggcaatgacaaaaaaggctggtttcaaaagactttgttgttgaatatcttccaataaatcaggttccggacttggttgactgtggtccattaagtacgttgaccgatcaggaattgtcgcgtgattaaccacgatatagttcaagaaatcctgatctttagtcgttggtgtccgttgattaagaagtctgatataactttcggttgcagccgttcccatgccgccgagcactgtaaaaaactgtttcatagtcgcgatcaccctttattttctttaaaataacgtgcgaagttcttacgataattgtgtaacatccattgtgttaatacccaccgtttagggttgttatcttttgcatattggaaagttgtgccataacgacccgctttgattaaggctaaagcctttgtcttatcttcgttatcgcgcgcgtatttttcaaaaacaccctttgaaacacctaaccaaagtgctgcttgatcattatctttattggcataaaccgttgcttggtccttcaattcgccagtcacgtaatccttaacaacccattgtgccaagttgtaaccatttaatgtgacgaagaagctactccggccttgacgtaagttgatttcaaataacttgtaagtttgatcgcgttcatcgtacttcatatcgaagttggcgtaacccgtgaacttgatggcttccaagaaagtttgaatttgcttgtagattgtttcgttgtattctggcatgatcgccacgtaattcccgattgctgatggtgcgggatcttccaataatggatgacctaaacacatcatcttcacttggtggttttgatcaacataggcgtttaaaacacgcatccgactgtcatctccagggatgaagtcttgtaaaatcaagtctgatgtgtagccattgtcatagatttttttaataatcatatcgaattcagcttgtgattgaatccggaatgcttttttacgaccttcaaaatgaacatctaaccattcaacagagttagcgggttttaacgccactgggtagccaaaaggttggtccacttgaccatcaagcaccatttgttgcgtaattgtcttagtcttaggataaggcaagtcgaattcttcacaaacttggtagaagttttccttgttattcaaacgttttaataaatcataatcgatgtaaggacaaacaaaggctgcttctaattctgttttatgtttagcaattaattcagcgtacccatcaccacaaccaattaaaatcactggttctgtgtgtgtttgatattttaaaattaagtcgcgcatcttttcaatgaagacgggatcttcactgaaaccaggtgtgatatccacatccacgatttttgtatagcgcgttggggcaagctcagcaccggcataagcttgcacgggttttcctgttaattcatagaatgagcgtgccattccataaacattaaaatcactaccgagtaatacgggtgtaaaattagcttcaattattggcattactttcacctcttagaaataatgcctctagtataccacgaacgccttgtcgagagacatcctctttaccttttcataaatataacagaattgtcacgctagcttcaatttcgttagttcgttcgatggtgagaaccacttgtcgatgctaaactaaatttatcatctacttggagggattattatgtcaaagaaagcgcgtctactcgcagtattagttggaatcgtatgtgtcggttacttaatcgcaagccagtcaatcaacgatcaatctgcggcgcaatctgatcgccaagaacgacaaagcatccataagatggcccgttaatcgttaagtagctatacgactttgttgtcatcaagcatttgattgtagtacaatgaaggtactgaattttaaggatgtgccaaaatgtcaaataaagcaaaagaattttggaaatcaacattacaaattgtcctattagccgctgtcatggtgggtatttcacagttattattaaccttcgtgatttccaatgaacaagtttttggaccttcaatgcaaccgaactttacacaaaatgatcgcgttatcgcgcttcgccacgccaaactcaaacggggcgatgtcgtcattctcaaagcacctgatgctaaaggggaattctatatcaaacgaatcgtcggaatgcctggcgataccgttcgattcgatcgcgaccagctatacatcaatggtaaaaaagtcagcgaaccatatctcaaagcctataaggctgatttttcaacctacctcgctggttcagattacttcacacttaaccccaaaacaaacggtcccacttttgatctcaaagatgttttaggtcaaaagaaggtcccagcgcatcactacttcgtcatgggtgataaccggaccgtttctaaggatagccgttacaaagaagtcggcttcatcagtgatgatgcctcagcttataacgggattcaaggggtcgttaagttacgctactggccaattacgaaatttaaaatctattagaagtgcgttgtcagtggttagcttttgagcatttgcagaacttagcgaattggtgatggaatcaccggttcgataagtttagcaaagcacagaaagctactgacaaaagcacgttaaaaaagaagtgcgtttaaaacggtttgactttgagcattagcacagctcggtgaataactgctgcaggcagttgtttgacgagtgacgctaagcacagaagtcagtttcaaatatcaaaaagaacccggacaaattaatttgtccgggttctttattttttatagataaacactgatgccgagtaaaatcatagctaacagaccgattgctaacatcaatggtagcacaaacttcaaccatttatcgaacgtgacatggaccatcgctaacgatgctaaaaccaagccagttggtgtgataaatgacatgatcccttgcccccagttataggcactgataatcacgtcgcggtgaacgccaaccacgtcggccaacggtgccatgaccggcatcgaaaggacggccaagccggaactcgatgggataaagaatcctaataggatgaagacgaagaacatcacggttgagaagatgaccccgctcatgtgtgaaacaccattgctgagccagaaaagtaaggtatcactaatctgagcttgttccatgataatcgtcacaccccgtgcaagggcgatgaccaaggcaacccctagtaaatcagaagcgccagccacaaattcacctacgaagtctttttcagacaagccagaaatgaaggctaagataaaggtaatcgctaagaataaggccgaaatttcattgaagagccagccccattccttaacgccaaagaccatgatgacaaaaccggccgcaaagatgattaacattaatttcttccggaaatcaaacttaggcacgacgttattttcttgatcacccaagaaatgagcttctaattctgctttttgactataaattaatgatttttcaggatccttcttcaccttttcagcatagcgaatggtatagaagatacacatcgccgttccgatgacgagcatcactaatctgaggcccatcccttctgtaaaactaatcccggcggtgttcgacgcgataacgactgagaacgggttcaccgttgacgccattgtcccgattgaactacctaaataaatcgcggcgattgcgaccagcgcatcgtagccggccgccatgaaaatgggcactaaaatgggataaaaggcaatcgtttcttcagcaagaccaaaagtggtccccccgagtgcgattaaactcgtcacaatcacgatcaaccaagcttcacggccttttaacttcttagatagggcagccattccggcagcaaatgccccggttttattcacgacgcccacaattccccctaaaataagtacgaaggtaataatatcgattgtttcagccaagccttgaataggcgcattcaagaactgcttaaccgcgccaaaaaggccggtattggcttttttcaaatgttgatacgtattcggaatcgctacgggtttgtatacggagccatccttaaatttcgctaaactcgtattaacatggtacttcttgagtgttgcttgcgtcccgggagccgttgattcacggccggtcgggctagtaatggtaaaattattgctttgggtattatattgtaaactcgcgtatttcccagacggcatgaaataggtcaaaatcatcactaataataagaccaataagatcaccgtataggcgcttggaaaagtaaaatgatgtcgtttcttcgttgccattgtcgctcctcctttataaatcactggtatacctctaatactagaagattatgacagtgtcgtcaatcaattacccgctttatttaaaccgctttctatttttttaaccttgggtttgcgcttaatctgtgctagaatgacacaaagcaaaataagggacgacagagagcgtcctttttggaggaaaattgaatatgaaaactatcacggcacacagccaacatcgattaacaagctaccagtctaaggtggtcgcctcaacgaccgccgggttcggactcgaaaacatggacgttatgttcttgtcttttgccttatcgtccattattgctgagttacacctcagtggcacccaagcaggactgatcgcaacgattactaatatcgggatgttgttaggtggcgttttttttggcgttttagccgatcgcgtcgggcgcattaagacgttcacctatacgatttttatcttcgcctttgccactgcagcaatgtatttcgcaaattcactcaccctcatctacctttgtcgctttttagccggaattggtgctggtggcgaatatgggattggcatgacagtccttgcggaaagctttcccaaaaaacaactcgggcgcgtttcatcatatgtcggtgttgccggccaattaggggcgattgccgcctcacttttagccgcttgggtattaccccaatacggttggcacgcactatttttattcgggctattcccagtgattatcaccttcttcattcgccatcacttagtcgaaagtcgcaactttgacaccgaccaagcacgacctaaaggccaaattaaagccctcttcaaaacgcgtcaattaacgcatcaaacgttagctttaatggttatggcagtggttcaaatcgctgggtacttcgggttaatgaactggttaccaacaatgatgcaacaacagttacacctcagtgttgctggctcttccacctggatgctcgcaacaattgtcgggatgtcagccgggatgctaacctttggttggattctcgatcgcatcggacctcgcgttgcttttagcagcttcttactcgcgtctgcagccggcgtctatgtgttgaccttacctaaaaatatgaccggcctcttgattgtcggcgcacttgttggctatttttcaaacgggatgtttgccggctacggagcgattgttagtcgcctctaccccgctgaagttcgggcaactgccaataacgtcatcatgaacgttggtcgctgtgtcggtggattttcaagcgtgattatcggctggttactggatcactatttcattctaaccgtcatgttattcatctcgacgctttatttaatcagcttcgtcgtgatgctcaccgttcaaaatttaaaagcggaacgctattttaaccatctgtaaaaaaagaaagtgttatataagtcgggtatatcctgaggattaacagagagtggcgaatgattgctgtaagcaatcgtttgacattcggcgttaaccacaaggatatgacttatataacacgtttagactataaaaattcgggtatcaaaaaaggggttgggacaaaaataaattttgtcccaaccccttttttattgtttaaaacgcacgcttatttttataaactgccgccgcggacttctgctatgttgccgactatcgtaaacgctagcgggtccacttcgtgaattttattaatgatgtgttggtaggcctgattttcgaccactaacatcaacatttgcttgtcttcgttagagtaaccacctgttacgtcaaagattgtcacaccgacatcagcttcttccaccaaatgttctttgatagttgccaactgttcgttactcatcacgtagagcacctttttccggttgaggcctgtttcgatgtaattcatcgtaatcaatgtcagaatcgatgaacaggttgctaacataaaggtttcaaaaccagaaacaaaaacattggcaaaacaaactaataaatcaacgaccaacaagcttaatgctggtttgatattaaaatacttcttaaaaattaatggtggcacggttgaaccgccactagatgcatcaattcgatataacaaggcgattccggcagcatataccacactcccgataataatcgccaacagtttatcttcaaccaccatcgcctgcggagtgatggccaaacaaactggtaacataaaactaccaaagaggattcttaacgtggtctttttatcgaggagaaaataagctaagatcagcatcccgatgttgatcactaagaccaccgtcgaaatccgccagcccattaattcctctaataaaattcccacaccggttgccccaccggctgctacttcgtggggggcaaagaagagttggatcccaattgcaattatttctaacgcaattaagattaaacccatttgcagcatcgtctgtttcaaatttgataaacgcatcgcttcactcatttcttttttggattgttaccataagtatatacgaatatcaaatgatatgccactttgacgcttttaagtaactagtcttgtgctaaagctgctaatttccgagcggtgttggcattgcggattgtaatccactggtaaagtgccttatttttaacaattgtcgcccagcgcgtgcgcccatgtgtcttaacaggtgcactccagaaaacaaactgccccgtaacagcaacctgctcataatcagccttaaccggtccaagttgttcactcagctcagccgctgtcttaggggcaattgcaacaattaaattatgggaagtcccagcagctgctccccaccaattaggggcttgttccacagctgcaattagagaatcagccgtaacaattgcaatccggactgaaaagccaaacgtcgtgaccatcaattgatcacaaaccgccaccaattccgccagctctgtttctggtgtttcaaataacacattaccactattaatataggtccgcacattcgtaaacccggcatcttcaaacgcgatccgtaacaagttcatctgaacttttcgcttaccgccaacattaattccccgtaataatgcgatatactgcatcttcgcgcctcgtttctacttagttactaatcatcataacttaaattgataattctgactatatagtgagaaccgttcggcccgataagcataaccaattgtcgtaaagttggtaaacgtcaaattatagaccactttattagttttgggatcgacctctacaatacgactggtcttgccttgatcgttaaacccaaaatcaatcaagtaatcgccatttgttaatttacgcgtacagccgattacttcactaaaattcgttttacccaatgttttgccgtaggaccaggttttcttaatcgtcttatcctgttcatcaattaaatagctgacaccctcggagtacttgccagacgtcttcttatcgccatttgaaacggccatatcattgttgaacaacactagttgcttctggtccgcttcgccggtcggccaaattgtggcggcgtgttgcccgtttggctgtcagcagctttcaacaataatttacggtatttcaatggccacttgctagccgatttactactgaataaccacttaattttagatgtcttgtaatctagtttcatgactaaatcctgattgcgacttgaaatgacgatgctatcatcactggtatcatagtcgattgaattttggtggaaccaatctaacttgccatcagcacgttttgtcgccttataggtttcatagagctcagctggtaaaagcttcttcaaatcaatcactttgaccactttgccggttttacgtgatgactcgaccattgtatcctccacgtattttgaacccccatccgaaaccgtcagcaataaattatggttcggtaattcaatcgcatcatggtggataatggttgtttcggttttatcatttgccgattcattgttacgcgtttcggttgagaattggtattcgcgataaacacgtcccataaagtcggtttccaacaaatcattgtagactaaatctttattatctggtttcgttaaatacagaagatggccgttgctgagtactttaaaaatatgttgaacatagttggttgaataccaccgaatttcaccatccgcatcgaccccaactggatattgtgttgaacgcactaagaacgttaggctactattgccaattgacatcttcgtcttatccgcttttttgaccttcaatgacatcgaagcaattgctttcggtaaagcggctgttttgacagtaatcgtttgatacgtcttatggcccgctttatccgttaatgttaagcgcaccttattttgatagttcgcataaagccctaaaaccgaaatggtatgactcttggtgtaatttttgccaacttcactcttaatgctggtcttagcggttttccccaccacttcgaccgtgaccttagtcgccgtatttgttttaaacaacaccagcgcactcagaggtgacgtcccataaggattgaccttaacatagggcttagcgctcgtatattgatcagagttaagtgcttttttataagtcgcggttaatttctcctgactcgtctgccgcgtcttgattgtctgactaccaatgtttttgataatctgagacgtactcaatatatccttgttaaataacgatgagcttcctactaatttaaaaaggagcagccccgctaagatgattcctaggagaatgatcgttccttgtttcagacgttttttcatacacaatacctcgtaatctgtttattagtagtatattagctttcctttgtgaatatttaatgattaattatcgagatattttcggaaaatttcgtctttgtaaatggcatatcacgcccatttagcctataataaatagttatggatttactaaaaaataacaaggatggctaaagcaatgacaaatcaactaaagccgcaaaatatcgctaaagggatgttttgggcaaccatggcttctgcactttggggcgtctctgggacaatcctcgaatttatctcgcaagggcaaaaagtccctgcgacttggttcttatctgttagaaccttaggtgccggtctaattctcttactaatcggtgcgattaagttcaaacaagatatcttctcaatctttaaatctaagcgattgacagcctggttaatcgcctacgcgctttttgggattatggggaatcaatacaccttcttcatgagtattcaaactgggaacgccgcagcggctactattttgcaatacttgagtccacttttcatcgtaattggaacgctcgcctttgttcgcaagtggcctaaccgaattgatttgatttcatttgggattgccttagttggggttttcctctcaattaccaaaggaaatattcatacattgacaattccgtttaattcattaatctgggggattttatcaggggttaccgcagcgttttacgttgttttaccacgccctatcgtcaatgaaaaatcaccgattttagtgcttggttgggggatgtttatcagtgggattttatttaacatcaaccgcccattctggcaagcaccacctcatttaaatggttctgggattattgcaatcttagctgtcattttaatcgggacagtttttgcttatctttgtttattacacagtttaaatttcgcaccatcaaccgtaatcagtatcgtagatgccgtgcaacccgtaatcaccttcatcctcagcatcattttcttccactcaaaattcagctgggttgaaatgagcggggcgatcttagtgattctcgcgatttacatcttacaacgctatcaagaagcggacggcgaaccactcgcctaatcaaaaaagagtgcgtttgaaacggtttgactttgagcattagcacagctcggcgaataactgctgtaagcagttgtttgacgagtgacgctaagcgcagaagtcagtttcaaaaagcacgttttcaaaagagtgcattgccagtggttagcttttgagcatttgcagagcttagcgaattggtgatgaaatcaccggtttgataagtttagcaaagcacagaaagttactggcaaaagcacgtttaaaatcagagtgtgtcgtaaccctgattttatcccgaggattaacacagagggacgaataatcgctcggcgattatttggcgctcagggttaaccggaaggatatgggttacagaacacgtttaaccaataaacacctcaatattacaaaaaagggatccgacaaagttattttgtcggatccctttttattacctattgaattgttaatatcgggtcaaatagtcttaattcattacaatcaacgtttcctaaatcagtaatggctaaatcgggaatcgctgtaattggtaagaacgtcatataaaacatcggatcgaccacttcactcccaatagcttggctggcttttaaaatgccttcttcttgaacggctagttcggccggcgttacgtcgctgacaatcccggcgattggtaatggtaagaaacttaaaatctgaccatcagccacaaccacctgcccaccatcgcgttcgatcaacgtattaaccgccaaagccatatcatctggattgacacccatcacgatgatgttattatcatcgggtgcggcggtcgaagccatcgcgccttttttgagcgtccaacccgaggtgaaccctagtgattggttaccatttttaccgaaacgttccaagacggaaatcaacgcaacgtcttttgctggatcgatttggacgatgccggcttcaaccgctaacgtcttagacttagcatggcggacaaaaggtccttcgctggcaatcgtttgaacagtgacctgacttgcatctgctgccacatgatattcaaagtcgctggcttggacagcctctctgataacagtgttggctaaactagccgggcgaaccgggcgttcaatactgtgatcgatatgcccgtcagttgccactggttggcctttagccaagacacgtgtaatttcaaaagcttccaaatcagaaactaataagatatccgcattgcgccctggtgcgattaagccgacttgatcatcaatgcggtaggcttcagcgctattgatcgtcgccatttggatggccgtcattggtgcaaccccggctgcgattgccaagcgcactaaatgatcgagatggcctttattgacgatatccattgcgttaacgtcatccgtacaaaagctgacatgccgtgcaatctgaccgtttgtttcagtgatagcgcgaatattttcagctaagaaatgcgtcactgatgattcacgaatcacaacgttaatccctttgcgaaccttttccaataattcctgatggtcgtaactctcgtgatcgacccggacaccactcatcaagtattcgttcaacttagtgcccgttgccattggcgcacagccccaaacaggtacgtggttatcttgggcactcaataatgtttttaaggtatcttcgtctagcgtttcaactgcttcacgcaccgtttcccaaacaccgtaaacgtcagaccgtttttgtagttgcgcttggaccgttgaatcaatattatcagcgatggtagaagctggaatcgtgtaaggggtcttgaatggcgcgccccagaaaacgcgcattggtaattgatcaacttctttaaagatttctgataaaccgtcgacaccaatcactgaaatatattcgtctaatcctgaaataatgctggttgtgccgtgtggaacaacggcttcagcaaaactagtcatacttaacttactacattccacatgaatgtgaccgtcaattaatcccggtacaatgtattgttgcttagcatcaatcacacgcgtttcagtcccttgataatctgaaacatcgggatccaccgcgacaattttaccttgataaatagcgacttctgccggataaatttcagccgtcatcacattgactaactgaccatttttaataatgaggtctgcgggccgtttagcacccccagcttgaattaattctttaaaagccgttaagcgatctgacataatcatcgttctcctttatttcggtaagatattaatgacgtacaacaagataacaaaaacaacgaataaagcgtacatggccggatgaatttccttgcgccgacccgcagcaagcattgtcacagggtaaactaagaagccaaaagcaatcccgtaagcaatgttgtaagtcaatggcattgcgataatcgttaagaaacttggtaacgccacttcaaagcgactccaatcaattttacttaatgagctcgccattaaaacaccaacgataattaaaactggcgcggtcacttgtgatgtaacgactgttaataatggtgagaataacatcgaaaacccgaacaatatactaaccaccaaactagttaaacccgtcttaccacccatggcaatcccagcagatgattcaacatacgcggctgttggggtcgtgcccataactgaaccggccatcattgaaacagaatcagccattaacgcttggccaatgcggggcattttaccatttttcatgaagccagcttgttctgccaaaccgattaaagtcccagcagtatcaaagaaagctaccaataagaagattaaaacgactgcccataattgtggttgattgatgtcacctaagtgttggatccctacgccaaacgtgggtttcatacttggtgcaactgacatcaattgtgctggtaacggaattaattttgtcactaagcctaaaatagtggtcgcaatcatcccaataaagatggccccatttacctttttagccatcaatacgccggtcacgactaaaccgaaaatcgtgagccaagttgttggcaccgtgaatgaacccatttgaacgagggttgatttgctggcaacgactaaaccgccaccttgtaacccgacaaacgcgatgaacaggccaattccggcggccatcgctagtttcaaatcatgtggaatcgcgtcaataatgtattcacgaaccttgaataaggtaatcaccataaaaatcaatgaggctaccacgacacccgccatagcggtctgccaagaaatgcccatcgcaatgacgactgaatatgtgaaaaacgcgttatcgccaagtcctggggcaatcgcgattggataattggctaaaaaggccattaataacgaaccaacaattgcggaaagagcggtcgctgtgaagactgcgcctttatccataccggcttcgcctaaaatctgtggattaacgaatagaatataagccatcgagacaaacgttgtcagtcccgcgaaaatttcgcgtttcattgttgtgccagattcttgtaacttaaacatgcgatctgcgcttgcttgaatccctgattgcttcattggtgccatttcccaatcactcccgtttatcattaataacactagtatgccaaactgcatttgattattcaagaacaattttattttatttaattaaatagttcgtgtttaacttgaaattgcgaattttttaagttatgctagtgccaagttattaattcattaggaggcagattttatgacacaattggcaacacgtgactttattgatggtttacctaaagcagaattacatcttcacttggaaggcacattggaacccgaattgaaattagcccttgcgcaaaaaatggcgttgatatcggccaaagtacgattgaagaagttcaagcaagctacaacttcaattcactcgcatcatttctcgcggtttattaccccgcaatgaatgttttacaaactgaagatgacttctaccaattggcattaacttatttaaaaaaggcccaccaagaaaatatccgttacgccgaattgttctttgatccccaaactcatatgacacgcggtgtagcttttgaagccgttgtgaatggcttttatcgcgcctgtgtcgatgcccgtgccttcaacgtcgacgcccacttaatcatgtgtttcctccgcgatctttccgcagagtcagcgcgccaactactagaaatcgccaaaccctaccaagctaagattctcggtatcggtttagactccgatgaacatcacaatccaccattgaagttccttagagaatacggcgatgcggttgctcaaggttatcggattacgatgcatgccgatatcgatcaagtggactcaatccaacacattcaacaagccctcgaaatcattcgcgttgaacgcctcgatcacggtaccaatatcgttgaaaatccggacctggttgactgggtcgaacaacttaaaatcggcttaaccttctgccctctttctaaccgcctcgttgccgatgatatgaaggatcaagaagttctcgaactaatcgatcacaatgttaaagtctcaattaattctgacgatccagcttacttcggcggctacatcaacgataattacgaagccaacactactaaaaacgatttaaccatcgaccaagtcgttcagcttgcaaagaattcatttgaaacagcgtggattagtgatttccaaaaacaaacctacctcgcagaaatcgacgcttatgtcgcagattacttgtaaaaataagacattcaaaaagcgcgttaagacaaattgtcttagcgcgctttttgagttagtgattatcttggcaccacatgcgtttcgatttgttgttcgccacctttgacagagccaaactttgaaagaaccgtaatcgtaccatccgcattcggcgtgaaggtccaacattcctccccttataccccagagtaatcgtgggccgtcattgaaccatcaggttgactactgaaagtgccgttatgcgaaacaataatatcaataccattaaacgccttcttagcagcttcaattgcggccttttcacgagactcgctcatcgctttagctgatgcttctgaagcctgtttttttagcgctactttgggcccgtaattttgattcactttgctttttagcccgtttttccaactgcgccgtactgtgactgttgcccacacgccgacataatatgtcactttgatgggtataaaaaagaaccgcagataaaatttatctgggctctcaatttttcttatttgtgatacggcgatccctgattaatcataaacgcccggtagatttgttccgttaaaactaagcgcatcaattgatggggtaacgtcaatttgccaaacgatagtgcgtcgttagcacgtttattgacggcatcacttgttccgagtgagcccccaatgatgaaagtgatatctgatgtgccataggttgccaaatcttgaatttcttttgcgaattcttctgatgcacgttgtttgccgtgaatggctaacacaatcacgtgttccttatccttcaccttggctaagatccgttcgccttctttatctttaacggtcgtcatttcagcctcgctcaaagattccggtgccttttcgtctgacacttcgatgatttcaaacttacaaaatttacttaagcgtttggcgtattccgcaatgcccgccttcaagtatttttctttcagtttcccaactgtgataattttgatattcataacgtcctcctagctaatacttctattttaggcgaaattgattctaaaaaaaagctattcacagtaattcaccgaaaagtacatgttatccacaaaagttgtccacatatgcacaagtgttcgtcccaagtcttgtggtttaaattttaccaaccactaaataatcgaatcacaatttttggaatgctttctaacaaaaaaagttatccaccgatttttaattattcgcactactgtgtatccatttacaaaagctattatatcagcattttaagtctgtttattttaattttaaaaagttatccactttccgtttattagcttgtggataacattggtgcttatttttccgtgttatacccacaatccacagacttatccacagacatctaatgttacctccttttggctatccacattgacttttttaaaacttaacaattcgactacttggtccccttgacgaacttcttttttaatttagcgccacaaaaaaaacgcgcgatcggaagaatccggtcgcgcgtctttatttttagttcgtttgtttagttgttgtcgtactatctgatgaagctgcttgtgtgagtttaacattcgcttttttcaagctgccattatgatagtactgaatttcagttgtgctgttcattgcgtaactatatagaattgtgtgtaagtctgccacacttgaaaccgtcttgccgcctaagccgacaatcacatcatacttactgataccagccttcttagcaactgaattgcttgttactgaggccactactaccccgctgttaacggatgatggtaattttagtactgaagattgttgtgttgatgaaatattggttaaatcaatcacactaatcccaagtgctggtctaaccactttcccgttagccaccaattggttaataattttaacgacttcgttacttggaatagcaaagcccatcccttcaacagacgtttcaccatttgaagctaatttcattgaattaatcccaatgacttgaccagccatgttgactaatgggccacctgaattcccagggttaatcgctgtatcagtttgaataacagttgcttgaccagttgtttggccggttgtttcgtctgtcacatcaatggtccgtttcttagcagaaataatcccttgtgtgacagaagttgcgtattctgagcccaatggtgagccgatcgcaagaactgattcaccagctttgatactatctgaatcaccaaacgttgccgtcttcttcactttagtcccgttaatttttaagacagccaaatcagaaacagcatctgtcccaactaaactagcttccaattttgtgccatcactcaaaatgacttcgattttatcagaaccagcaaccacgtgattattcgtcacgatgtaagctttgccgtcttttttctcgtagattaaacctgaaccttcactggattcttctaaatcactgctactgctcttagaagaactgctattgctgtcagtgctccctgaaccaaataatgaactcaggtcaccggttgattgttgttgtttttgtaagttcacaacggatacaactgatgtattaaccttttggaaggcggttgtcgtttgtgatgatgagttcactttgatgttactaatcttagttgcccccgctttagtaggcgtctgcgttgcagtcgtgacgtcattggccgaattgccgagtcgagaaaaaccggcataggctgcgccaccaccaatcaacgctgaaataaccacaacaatcgctgttttcattaatcctgaattttgattcatactaaatcacccaaactttctaattttattctgtttattgattatctctatcataaaatttaaatttgaaaaattcatgaacaagttacgaattttaaattgtttttatagcggtattttaacgcttttatccctaaacaacaaataaagggtccgcaatcgctggatctgtatctaaaatttcaaagtccgtgccaacaccataatcatgttgttctaaaattgacgccaccgttaagtgtgccaactccttcatattgttttcttggctcaaatggcctaggaaaacgcgttttgtttgttgccccataaaagccattaaggctgaagcgccatcttcgttagacagatgtccagtatcactaaggatccgttgtttaagcgaccacggatattttcccatccgtaacatttccaaatcgtgattacattccaccaagtaggcatccgcattttcgatagtgcctctgatttgatccgaaacgtaccccgtatccgttaagattgcgaaggcccggttgttatgatgaaattgatagaattgcgccgcagcggcatcgtgtgacacaccataactttcaacatcgatatcgccgagtgttttggttttgcccatctcaaagacgtgcttatgttcatcagggacggtgccaataattgacgccatcgcatcccaagtcggttgattggcgtacacatcaatcccgtaacggcgggctaagacgccaacaccgctactgtgatcgcgatgttcgtgcgtcactagtagactatcaacctcttttaaatcccgaccaatgctatgcattaaatcctgaacccgtttgccactcatccccgcatcgactaatattttttgagttggtgtttcaataaaagttgtgttgcctgaactactgctggctaagacgctaacccgcatttcatctttttctaccatttatccgctatccccttggctttttcactgattcttatgatgttacttcgctgcgattctttattaaggtgccggtgaacgcattgatgcgcttaacgacgacgtttttggtactcttattttcaatggcgatttgccaggctggtacataaaccgtactgctattggcatctaataaggcgctatagcctaattgaacccacaaaatcttggaattattcggaatttcgttgtcagtgtataaatcgacaactgccccttgcgcagaaattttggtcatttctttttcacgtaaaatttgcaccttattgatgtaagtttgcgtatactgactgatttgcccgttatccaatgtaaaaattaactgcccgtgttcgtccatcatttgtccgcccggcaccttttgaacgtaaacagcttgttgattacttgataatgcttttgaataccggtactgatcagcctggtaaacattattgccatctttcaagaaagcattgatagccgaagatgcccgcccctttttatagctcaacggtttgtcgagtacgcttgtcagggttagtctagatttatcaaacgacgccgtctgcccggttaacttggcgctagcagcttccaagcccgtctgatcagcttgtcgactggctaaataataactttctcgtttttgattcgataaccgattaacggtaatctgatcatcctttaaatcttttaaaatctgactggtttgcgaacgattcgtaatagaagccgaattggtcgtttgactaccactaagcgacataaacaaatagatatcgagcgcaataaaaatggcgataaaaatcatttcaattctgcgaaaatccatctgtctaactcccttcggttagttcttctttctgtgctaataatgcgctaaggctacgccaaacacccttgtactgaataaaataagttggattaagatcaattacttggtcattacttgtttcttgcgtccactcatacccaacttgaatattatcgatattctctagtaataaaccatttttagtcatctgatttaagacggcttgtgtacttggtaaagtgactggtttatcacctgctggtacgggcacttgtaaactatagtttgagaaatcaacccgttgaccagttggcaataactgtaccttaacactcccaaaattggtttggtaaaagactgggaagccttcaacataggtccggtaggtcgtcgaattggtatcttcatcgtaactataaaaacgcatcccggatagtgaattgccggtcttcaataatgcttcaaaactcgtttcaaaactcttcgttaaacctgttggcgacttggtatcctcatacttcacatacgcaatttcacctgttttatgattaatggttagtcgcttgtataaatcgttattgtcaccatctgtatagattacgttgtccccttgttccttagcgtcaatgttatccgtattcttttgatccaacaaagttgtaatgtagtaattttcaggttgttggttcactaaataactgtacggtaaaagtgactgattggcggccacataaataaacggtttatgatttaacagactctctttaacgtttaaatgcacatctgaatgatccaagattcgtttgacctgcgcgactgaaaattgacgcatcgtcgtttgatagatcatgtgactcttatcgttcatcaacgtcaactgcggcttagtccccatcgtaatcttgattcgattaaaggtcgtattccggctcaattgattattactgtcgtcaaaaaccttcttaaagaccgcatacgaaatattgtccggatacaataaagtcaatgtatcatcggttgtaatcgcctgataataattggcttcacttaacttagacgctttaaaccgtgctgatttagccaacttcatggcttccttcaacttgggcactaagctttcctttgaattataaacaagctgactctgttgattggtccgccacaggatttgcgtgggtaagaagatatcgctaattttgcgatctgacttacggctgaccgttttagtcgttgtttgactgtctgtgcgccgttcatagtgcgtattattcgtccagattttccaagataaaataatgcttaaaacgattgaagtaatcaggatgactcgcatcacaaaactattaaatttcatcccaatcacctccatcagaatcaattggttcatatggtaaagaaatgtagaaggttgagcctttaccttcttggctatcaacccaaacacgcccattgtgcgcttcaatgacttcttttgaaattgccaagcctaaaccagtcccaccttgtttgcgagaacgggctttatcgacccggtagaagcggtcaaaaattttgcctaaatctttacgaggaatccctaagccttggtcagaaatacttaagatgacatggcggtgagtttccaataagcgacaagtgatgaccccaccatctggtgagtacttaatcgcattattcatgatattatcgaccacctgcatgaatttatcggtatcaatttcgacccataaatcccgcttggtgaagtcgcgcgtgatactgtactttttattaggatcatcagttggtaacttacccgtccctttaggtgctgcattattatcatgctcttgatcccgtttaatcatcatatcaaaccgatcaagtacatagccaaagaattcgtttaaattaacaaattctaaattcattttagcggtcccttgatccatccgggataaactcaataggtcgttaatcatccgaatcatccgatcggtttcttcttgcgtgaccttcaaaaagttcggagcgactacaggatcttgccaagcaccatcattgagggcctcgatgtaacttcgcacactcgttagtggcgtccgcaattcgtgagaaacgtttgaaacgaattcgcgttgttcccgctcattcttttgttgttccgtcacatcatgtagcacacagactaacccagtgatatagcccgtttctctttgaatcagtgaaaaatcgacatgcaaaatcaagtcatggtcttgttgatctgaaaaatctaggaccatcacttgttgggtttctaataaatcgcgaagtgtgtattcttcactaattttaagtacttttaaaagcgattggcccaagacgccatcgctggtcacattgagaaaatcctgaccggtttcattaataatcgtaatattcccccgccgatcagtcgcaattaccccatcagtcatgtggctcataacgctatctaatcgccgtcgctcagactcggacgcttcttgcgcctcttccacccgaactgataagttattgaccgcaatcgcaagttggcctaattcatcttgcccataaatgcgcacttgacctgaatagtcaccacgtgccatctgaatcgcttgtttcttcatttcatcaattggacgcgttattgcccgggaaatgacaatcgataaggccatgcctaatagacctgccacaagagacgaggtcaagaaaataaccgtgatcgatgaaatgcctttatagacctcttccatactagcgcgaatatagaccgccccaaccaccgtattactgtcaccgttgggatctgtcagcggttgaatcgctgtataataactcccttggctttcactgtaggcaacttcttgttccgtatggccagaataaatcgcctgcttaacacgcggattccgtgttttttgcccaattgtactttgactattcagattggtaacaccccggatagtccccttattatcgacaacttgaatttcagcagagttgcccatatcaccaataatatccttgatattcttatttgcgttaccactattactcatcaactcattacttaattgattttgaacatagggtgtcacctgtaatgactgcttaaaatctttcacattttggtattccaattgcttaacaaatgaagccccaatcacctctagcgtcactagcagcaacaagacaaaaacaattgcaatcttgaaatggattgattggaataaccgaatttttttattcatgcgttaaacttactcctgctcaggatttcttaaatagtacccaacaccacgacgcgttactaaccactctggatggctaggattatcttcaattttttcacgtaaacgacggactgtgacatctactgtgcgcacatcaccaaaatagtcataaccccaaactgtttgtaataaatgttcacgcgtcattacttgcccaatatgtttggctaagtaatgtaataattcgaattcacgatgcgttaattcaatcttcgtgccccgtttagacacaatataagcttctgggtgaatcgtgaggtcgccaatgttaatttcgtggttttcctcatttgcttctttatcagattgactggttgacccttggcgtcttaaatttgctttaacacgggcaaccaattcacgattggaaaaaggttttgtgacataatcatcagcgcctaattctagcccaatcactttatcaatttctgaatctttagctgttaccataataattggcatatcgtgtgatttgcgtacctggcgagcgacttcaagaccgtcaaccttaggtaacatcaaatctaatagaattaagtcagggacaacttcttcaacttgttgcagtgcttcttccccatcataagccgtataaacgtcatagccctctttcgttagattaaacttaacgatatccgagatgggtttttcatcatcaactaccaatatttttttagccattttagtatcctccttggatgctttgtcttctattatactcattttaagaatgcaattcaaaatctggtctcgttttcaatcccgttataatcccgccattaacgatatttgatgggcctaattgggttgctacttactcccgcaacaattttattgaaaaaaatcaaaaaaactgtttacagattgccaatccctatggtatgatatttaagtcgtaaggcatgagacattatatcacatgggtggttagctcagctggcagagcaacggactcttaatccgtgggtccagggttcgatcccctgaccacccatcaagtatacacgataaatagtcataatgatgcaattgcatcgttatgactatttttttatataaaaataaaagattatccacccagcaaagcccgcctatctgagaagataagcgggcttttgtgttaggccttcacggcacgacgtcttaacgtcgaaatactaattcctgtttttaaactaatctcttggatggttaaacctttttcaacatcctcagtgcgccttcaatttgctgatctgtatacttttgccgccggccttcatgatagagtgggttattcatccgcgcagcttccttaccttcttgtgtccgcgtcacaatcatatcccgctcaaattgcgcaaaggcactcagcatcattagcattaggtttcctgtgggggtatcctcaatggtccccatatttaaaattgtcaccttgatattacgcgcaaacaactctttcgtaatacttaaagccccaattgtattacgcgcgaatcggtctaattttgtaactattagcgtatcgcccggttttaacttttttagaagcaacttaaatttaggccgatcagttgtcgtccctgtgaatttttcggaatagattttatcacaatcggcctgctttagttgctcgatttgtgtatctaaattctggcccatcgtagacactcttgcatagccatatttcataatagtgttacctcctaaaatttgatgcacaaacttattttaaaagatacgcgatgattagcaaggcttatatttacgttttgtaaacattccgttaaggaactatcgaaccacgtcgcctaaccccaagtgtacactctccgtttaagttcatctactttattgtatctataagttatcacacccatcatgactcgttaaagttatatgctttaacgttttatcaaaaaagcttaactcttgttaagcttattaaaattttaataatcctttaaagcttttgttatcaatcgtttcatctaatatcgctagcaaaaatgacggtctatattaaattttgcacaattattattaattattttgaaaatttcatcgcattattactatttagtgactattaatagtcaaaaataataaattgtttttcagttagtactatgcaaatatcacttgcttttaaatacttctctactttcttataatatgattaagctcaattgggggaggaatcatcatgttagccactacgcttaaaaaacgtcgtattgatctacatttaacgcaacaagctgtcgcagatcagcttcacacgagtcgacagactatttcgaactgggaaaacggtaaaaactatcccgacgtcccaatgctggtcgccattagtaatctatatgatttatcactcgacgatatgttgaagcaagacaccaactatctcaataaagtcgctaacgattaccagttaattaatcaacaaaaaaagacacacttattagattatgccttgttgcttactttatcgggattggtcatcatcattctagctacgatttttttcaaatcactggtcaatgaacagttaactgggctcttagtcttagtttttacaacgatcctcgttatcttgagctactttaaaacagttcaattctactctaaacagcctggaaataagcagcccctcttgattcctaaggtcgttggaatcggcctgacaatcaaccctaaccatccaattggtaaaataatctggttatttattttaatttttgtagttggtagcttactgaccgttattttttgattgctatcattttttattaccagggaaataaaaaagaagctcagccatcggattggtattgcccgtggttaagcttctttttatattttcactacaagttttggctttcttcaacttcattatattgatacaagaggagttccatgatggcaattagtgaaacatgcgatgtcatttcaactttatgttgataaagttcgtccgtaaacagataaagattgatgtcactcatattttgaatggtgttattattggcgcccgtaattgatactaactttgcatactgacacttgcgctcaataatctgcaaaatttcaattaattccttatcttcaccctcgtaattaaaaacgaataagatatcatcttgattaatatttcgataagcgagctgacgttgttcataattcttcggaaaaatcacaataaaaccttttaaggtatacaagtattcgatatattccgcagcatatttgctaaacccttttgcgaaaaaatataacttgggccttttgatcattagcgtcacaattgcatttaacttatcattatctaagacacggactgtttcattaatattcttgaggtattccgttctgtaggccacttgattcaccacaaacggattcacttcttccgtttgatcctgattcaaaattgtatatttgatgacggtgatgaactcgctataacctgagaacccaattttacgaacaaaacgcaaaaaagtcgtcgtcgatacaaaacattccgcggctaattcacggatactacgatttttaatatcatccatatttttaatgacgtaatctagtaaaatctgttcatttttgttcaacttatcaacattcgcattaataatttcaaaaaaattcattttaagcctccgtatgtgcgggtactgccgcaacaacacagtgaacatccccgccgcccaataatagttctcttgcatatactggttctatcttgcgatctgggaaaatttgcgtcaacgtttgaatcgccacggtatcttgcggatcatcaaagataggtaagatgattgcatcgtttagcgcatagtaattaacataactagcagttaagcgatcacctggatagcgaggcaagagaccgttaattggatcgacgcctgcactttcttcttgagtcgcaaacagtggctttggcatttgtaatttatgaatcttaaagtgccgacctttagcatctgtcgcggcctctaaaatgcgataggcttcttctgaactggcatattgtggatctgattgatcatccgtccaagtcagtaataattccccaggacgcacaaaactgagcatattatcaacatccccgttagtttcatccataaaataacctagttttaaccaaattaccttttcaatgcctagataagcttttaaaacagcttcaacttcggttttagtgagcatgccattgcgcccttcagaaagaatcgattcctcggtgacaatcaacgttccttcaccatccgtatggaaagcacaaccttctaaaataaacttctccaggcgataataatcgatgccggttagttcgcataatttctgtgcgacctggtcatccatatcccaagggaaataaagaccatccactaagccgccccaagcattaaaccgccaatcaaccgcccgaatttgattcttttgatttaataaataagttgggccgatatccttaatccaagcatcgttataactcatctcaatcactcgaatatctgcgggcaatgcataacgtgcattttgatattgctctttggaaactaacatcgtcactggttcgtagtggttaatgatggttgcaatttccgcaaatattttttgtgccggcttggccccattacgccaattatctgaacgttctggccacatcataatcgattcacgatggcgatttgtttctgctggtaaatagtattggtcctctttaggggtagtccctacgattttcattgtgccactccattctgatctctcatatcgcttgattataacccaaaaagcgactagaaaattgactagtcgcttctttgaaaactactgatggataacggttcctttatcgccggtgataatttgacgaacatcatctaatgcgccaatcacggccggattaccggtttttttaacaaattgaacagctgctttgaccttcggcatcatgctgcctttagcgaattcatcagcatcaatatgcttttgaatttctttggcagtgacatcaaaaatctcttcttgatctggttttccaaagcgatagaacaccccgccaacagaggtcaaaataattaattgatcagcctcaactaattccgcaattttagcggcactaaagtccttatcaatcacagcttcggtgccaattaattggtcaccagatttaacaacgggaataccaccaccgccagagataattgggataataccagcttcaatcacttttttaattgcagggtattccttaatttcaacaggttggggtgaaggtaccacgcgtcgatagccacggccggcatcttccatcatttgccaatcagggtgtttttcttgaagccctttaagcgctgcttcttcataaaaaggaccgattggtttagtggggtggtgaaatgccggatcatcagctgctacgatggtttgcgtcaccatcgccaccacactcttatcaatttttctgagcgctaattcttcctgcattgcattttggaaccaataaccaatactcccctgagtcattgcaccgcaagtgtctaaagccattgcgggattttgatcactatcagctgcttgttgttgcaacaatagattcccaacttgtggaccgttgccgtgtgtaatgattagttggtccccattttcaacaaagttgattaatgctttgacagttgctttgactgcctttttctgtgctgtatcggaggcatcgtttgctaaaatagcattgccgccaagcgctactacgatttttgccatcactagacccctattctaacgaccagcaggaatttgttgagtgatacagtgaatattaccgccacctaataagatttcgcgggctggaacaccaacaatcttgcgatctggatataatttttgaagtgtttcttgtgcttttgcgtccattggatcattaaataatgggaagacgatcccaccatttgcagtgtagtagttaacgtagctagcagctaatcgatctcctgctaaacgtggtaacgtcccgtcaactgtatcaacaccttggctttcagcttccgtgatcagaattggttttggcaagtataatttttcaacttgtaacttgcggcccttagcgtccgtttcattgatcagcatgtcatagttttcttttgaaattgcgtattgtggatctgattgatcgtctgtccaagctaatacgacttgacctggtttgacgaaattagcgatgttatcaacatgaccgtttgtttcatctaggtagataccctttttcaaccagataatcttttcaacattgaggtattctttcaaaatactttcaatttgctctttagaaagttgtggattacgaccatcagataataaacattcttctgttacgagtaatgtgccttcaccatcaacgtggattgaaccaccttccaacacgaaatcgtccaagcgatagcgatcacgaccttcgatttcacaaaccttttgagcaacgcggtcatccttgtcccatgggaaatacaagccatcaacaaggccaccccaagcgttaaatgtccagtcaacaccccgactatcgcctttatcattaaccacaaatgttggcccacaatcacggatccaggaatcgttattcgacatttcaacaacttggatattatcagccaacatgtgacgggcatttgtatattgacgatcactaacgccaacggtcacactttcaaattgggcaattgtttcagcgactttggcaaaagttgcttgcgctggtttagccccttcacgccaattatctggtcgttctggccacaaaagataaacacctttgtgggcttcaaattcaccgggcatgcggtaaccgtcttttttaggcgatgtttgtaatgttttcatagtactaacttcctttctatttctgatcaacttgtttttcagcgtgtctgatacaaatttctccaataatgatagtgacaatcgtcccaattaagattggtaacttgctgcttagctccgcgtgactgccgtttaatgggaacgccgttaagattaatgttaagcccaataaaactagtgggacataagtcatcaatcggataaccactgcattaccgtgaatcttaaaaggccgattacgatctggatcaatctttctgagttttaaaaatgatgggaacatcaacatatatgaccctagtaaagcgaccacatttagtgagaagaatgcccagaaaatattgggattcggaataaacggtgcggcgactactaaaatcgttgcgataatgccgtttaagaacgttgctccgactggcattccatttttagcgctcgttttttggaaaacacggggtaaatcattgttcttagcagcatataatgcaacatagttaacaccggccgaccaagaaatcaagttggctgctagtgtgtacataaagagaatgccgattaaaaccacgaaccaattatgatgtccaaccaataataaaatactatccattaaaccaccagatgtcgatagttgactgcttggaattgcagcgcccatcccgaaagcagcgaataagtagaagaccgcgatcaagacgccgccccaaataatggcttggggaatttgcttcttgggattttccatatcactagccattgttgcaaccacttcaaaacctaagaagttaaacaaaataactgagatatacccgagacttgtcgcatcaaacttaggcaacatcgctgtcccagagaaatcattagctaatccttgcgtggcagcatggtaaataccaagtgccccaacactaagcataatgaccactttagcaaccgccgctaaattcaaaatccatttactatcagcaattggataacaactaatgagtgtgacaagccagataaagactagttcaataatgatcccaacaggcgtcgctatcttaatctgaaaaatttgtgctagcacttcgttgaataagacagctaaacttgccatccagatggggaaattaatccagtataaccaggctgctcttccgccccatttgcgaccaaaagcacgtttaacccagtcataaatgccgccttcatcatcatatgtcgtccctaattccgcagaaattaggccatacggtaagaagaaaagcagtaataaggcaccccaccagaagaattgcgatggtccgattgcggcagctggtgcagccgattcaacgactaagacaacgactactgacattaatacggcatcaaatagtttaaactttttcttttccatattgtcaccctcatttattgatcaactattgtctactgactatttggttgaatcgattcgattatttaataagtcttttaatactggatcttttaagttgtttaatgtgtcatctgaataatcgataattggtgccatgagataaacaagtaatgcgcgcatagctgtcaaacgattttcagcttcgtcccaagcaactgaagcatctgaatcaagcacactatctgtcacttcttcgccacggttagctggtaaacagtgcatgaatttagcatgtttagcagctttagccatcaattcatcgttaacttggtatttaggatagaaaattgccatccgttcgtcatatgaaagtggtgattcatataaaccgtaccaaacatctgtataaacaaaatcagcatctttcattgcttgatcggtatcttctgtgattaagacactcccacctgaaacttcagcattcttttgaccgattgctaatgtttctggtttgatttgatagccttttggtccgtattgaacgaattgcatgcccatcttagtagcgacaaacattaatgaaacgcagacttgtgtggcatccccgacgaaaacgactttacaatcgcttaacttcttaccagctggtaaatgttctgccattgtgatgatatcgccgatttcttgtgttggatgattgtaatcagtcatcccgttcaaaacaggtactgtggctgcatttgcaattgtttcgattgtgtcatgtgttgcaacccgggccatcaagatatcaactaatcgtgataaaacaattgcggtgtcgcctaatgattcactttcagcactgccaaggtgaatttgaccaggtgctaaatactgggcgtgcccaccaagttgggtcattgctgtttcaaatgatacccgtgttctagttgatgattcttcgaataacatccctaatgtgcgattgcttaataattgtggatagtcaccagctttgatatcctttttaatttgcaatcctaaatcaattaaatattgaatttctgcttgtgtataatcctttgtatcgataaaatctcttttcatattggccatctcctaattaatctcttttgactacgcttacaatataattttttcacgaccaaattgaaataggtttggtgactatcggtttagacgaaatcgatgtgtattttgttccattttgcggaacaaaatacacccttttggtgatacacaaaaagaccccagttgcggtatttaccacactggggtctttgttttttaattagccaaatacttttaagttggttttattcgctttttcagtcttcactaattcgccttggacgcaccaacgacgaaccgtttgatcacaggtaattaaggtgaccattttatgtcccgggacatcatcgattactttgacttcttcaggggcaatcgattttttaacgtttacgcggtatgaatagacattttgtaaatcggttaggtaaaccatatcgccgactttaacattttccaatggtaaaaagatgttggtaaatgaatgacctgctaaggcgtagttattatcggcccccatcttctggtcaggcttcatcgtaccaccgccttgggccattgttgcttctgagacgcccttcatgaccggcaatgcaattccgacgctcggaaccgcaaccttccctaaaacaatcacatcgcccttaacggcggcgctgacgatttgctttgtatcgagtgttttaacactattgaaatcaaaattagcctttttatgttcgtttttcttaatttgagcggccgtcaccgtattcatccggcgattagccattgatttaaccatttgattgcgaattgggccaataaaaacaagtattaaaccaatgagcaataaaagtgctagcagactattaataagccgattcttcgtctttttttgcacaacaatttatcccctttactactgatttattttattgtatcacatctcaaagcggttactcattttaaaaagtcttatttttccacaataattgccggatgcattaaatttcgaaataaattagcggtaatcgcaattgccagtgagataacaactaaccctaggccaatcaacatgacacccggtgtcgcttgtctgactgcaattaaatagaataacggtaagctcaagaggtaggccgcgccattgatactggcgactttttgaatttggcggagggcttgttgtgtcttctgtccaaaatgaccgactagatcgacctcgcgtaaaattcgttggagttggtacaacccccaaagtgccaggatcaatgacccataaaccaagagaacgaccaaccacaagccacccggaatttgggggaagttctgcgcaattttatgcgttaaccgtggcccaatcaacccgataaagattagcggtaagctggctaagccacaaactaatttcaaaaataggatttgaattttcatgtcactcacctcctctttaatttaagcgattcacaccaaataaacaatttaaacgccgcgcctttatccaaaaattaagaaacaaaaaagcggctgatccacaggaccaaccgctaagtcgtattaaccgacgtttagaatatacataaagattacgaatacgaaaaagagcacgtacataattggatggatttccttacgacgaccagccgtaatcatcgtgattgggtaaacgataaaccctaaagcaatcccatctgaaatactgtaagttaaaggcatccccaaaacgattaagaaagctggaatcgcgatttccaatttttcccagtcaattttcttcaatgattgcgccattagcaccccaacaattactaaagcgggcgccgttacttgtgacgtcacaaccgttaaaagtggtgagaagaataaactgaagacgaataaaatcccggtaaccactgctgttaaaccagtccgaccaccaacggcaatcccggctgatgattcaacgaaggccccaacaggtgatgtccccaagagtgaaccagccaacattgctgaagaatctgacatcaaggctttcccaacacgtggcatcttgttgtccttcatgaaaccagcttgttcggctaatccaaccaaggtgccagctgtatcgaagaacgtcactaataagaacgtcaagacaaccacccacatttgaaccgtattaatatccccaacatgattcaaaccagctaagaaggttggttttaaactaggtgcaacagcaacaaaatgggttggtaacttaattaaacccgttacggcccctaaaatagaagttaagaccattccgataaaaatcgcacctggtacttttttaaccattaaaataattgtaataatcaagccaaaaactgttaaccaagtcgtgccttgtgagaagtccccaagacccacgactgttgatttattggcgacgattaaaccaccaccatgtaagccgataaaagccacaaacatcccaatcccggccgaaattgctaatttaagatcgcgcggaatcgcatcaataatgatttcacgtaatttaaaaatagtgattaccatgaaaatcaatgaagcgacaaacacacctgcgagcgccgtttgccatgaaacacccatcccaatgactactgaataactaaaaaacgcgttaatcccaagtgcgggggctgttgcgattggatatttagcgtacaagcccatcaagaaacacccgatggcactggctaaagcagttgccgcgaaaacggcccctttatccatccctgaagcacccaaaacgcttggattaacaaataaaatgtaaaccattgaaataaacgtggtgaatccggctagaatttcccgttggaccgttgaatgttgttcttcgataccgaagaaccgacttactttttccataataactcctctaaaacaactaattttcccactatctttttagtggtaatgtgtgtataatactgactggtgccaaacccatgagaatgaaagtttgttggcgcgtttaacgacgcgtttcgaaaacgaactttgcattctctttttttgtacccttttttaggctgtgcttaccagattgcttttaaaatgtttgtttgatcacgatcgggaccaactgcaaatgtggctaatggtaaatcaaccaattcttgcaagcgttcaacataccgacgcgcgttgactggtaattcttcaagtgtcttaacgccagtaatatcttcatcccaaccaggtaattcttcatagattggtgtacaacgtgctaattcgctcaagcttgctgggtaacgatcgatgcgttcaccgtctaattcgtaagcgacacagattttcaacgtcttcaaaccagttaaaacatcaacacagtttaaacaaagttgcgttaagccagccacccgtttagaatgacgaagcacaactgtatcaaaccaaccaattcgacgtggacgtcctgtaacagtgccgtattcgtgacctgcttgacgaatgaaatcacccgtttcatcgaataattcagttgggaatgggccatcaccaacacgtgatgtataggctttagcaaccccgaccacttcatcaatccgtgaagcgccgacccctgaaccagttgaaacgccaccggcaggatttgaagaagttacaaatgggtaagtcccttggtcgatatccaataaaataccttgggccccttcgaataagacgttgcccttttgatctaaaacatcatttaaaacaacagatgtatcacaaacgtattgttttaattcttgaccatattggtagtattcttcgaaaattgagtcgaaatctagagcttcaacttcataaatctttgtaaataaggcatttttttcagctaagttttgttttaatttagttgcaaataaatctttatctaatagatcagccacacgaataccacttctagctgctttatccatataagctgggccgatcccacgattagtcgttccaatcttttgatcacccttagcggcctcttgtaagctatctagcttaatgtgataaggcaagatgacgtgggcccgatctgataatttcaattgacttgtatctacattcttgtcagctaaaccacgtaattcgccaacgagtgatttaggattaaccacaaccccgttaccgatgacgctgaccttgtcactgttaaaaatcccagatggaattaattgtaaatgataagtatcttcgcctaatttgatggtgtggcctgcattgtctccaccttgataacgagcgattgcgtcagcattctgacctaaaaagtcggtgattttccccttaccttcgtcgccccattgtgttccaactactactgcagatgtcatatgaataaacccctttattcaagttaattgtcttaacctgatatttaagtactaaactcacaaaagctattgtaccaactcagctatttgaaatcaaccgaaaacacgaactttattaataaacactacctgattaacgttttaaatcctaatgatgattacacaacgttaatacagcgctttaaacacgaacaataattacggttttgacatccaccaacttgccctctacaattaaaccatcttaatctttcaaggagttgcctaatgctatatctcgataatatcatcaccgcagcgacgatttttccgtttgtcgcaatcgccctcacaattccggttttaatctatcattaccggcgttctggcgcactaaccttttggcgaagcttagtgatttatagctttatcttctacttattagccgcctactgtctcattatactccccttaccaccaaaatcagtcgtcgctcatttgacgaccccgcgttataacctagtgccgttcacctttgtccgcgaatttattaacacgacacactgggtttggaatcaaccggcaacctatcttgcaaccctaaaacaagcggcgacgattcaaccactctttaatatcgttttaaccattccatttggtgtttaccttcgttacttcttccggacatcattcaaacagaccctattattaagttttggcctcacattattcttcgaattaacccagctgtcaggactctatggcatttacccccgaccatatcggttattcgatgttgatgatctactgctaaacacgagtggcggactcatcggctttggcttagcacccttattaacctatttcttgccgactcgtgatgcacttgatcaagcggcttacatcaacggccaaaaagttggttatctccgtcgcttattagcactgggaatcgattactgtctcttaacactgattggcatgattgttacagcgatttggcgtttattaaaactaccaacttttggtaatgatgttttctactattgtttagaaaacggactctacttcgtcttactgcccgtcctctggcggggacagacacctggtaaagcgctcttgaggttaaaaatcaccgccgaaaatgccgttgcttggcggatattcagtcgccaatttttactgttctttatcatcctacctagtttccaattatggcggatcaccatcgatgccttggttgctagcggccaagcgcatttagatatctaccttctactgggtggtctggctgccttaccacccgtcttatttacgggtaacttcctattatcgtggcttttcaaaaagccccaactcttttatgagaagttaaccaagacccaagaaatgagtttggttcaaccacaagcagatcatcccttaaaaaataattaaaaacaccgcttaattctaaaggtctagcaaattaagatactttccctgttaaattagctataatgaaagtatcttatatctgagaaaggatttacgattatgtttaataaactcaaatacattctcccaatcgtcatgacggctattttaggtctcagcgcccacagcgtttttgccgacagtaatgcttgggataaaccagtcgcaacactcggaacaagtctttcaagtacgcaaaaatcagaaaccctctcaacgcttcaaaacgccgctaacatcaccgattctgatgaattaacggtcaccggttcaaccctcgttaaatatctcgatcaaaatcaacaaacttttaacgcggattccaacgtttattctagtgcgttgattcaaaaaaataatagcaataccgggattaacgttaagattgtcgattttaacggcagcaacaatatcacaacaattaccgcgaaccaatataaaaacgcagcgttaaccgccggcgtcacaaacgcgacgatctacgttacttctgccgtaccaattgacggttctggtgcgctcgctggcgtttacgccgctttcgcggaaaatggtgaaaccttaaatcaatcacaagttaccgccgctcaagacgaaatgagcaccctcagtgatattacccaagctaacaaaggcactgacggctatactgattcacaacttaacaacgccgtaacaggtgctaaaaaagacatggctaacaagggtgataacctaaccgttaaccaaattaccaacatcgttaataatcaattagaacaaaataaccttacaacaatcatcaacaataaccaaaagacacaaatcattaacttactcgttaaaattcaagattctggtgcgcttaaatcagatgattttaagaaccaagccggtaaattaatggataacattcaaagtaatgctaagaatgtcttcgacaaattaaacactgaaagtaaccgtaacttcattcaaaaattattcgatagtattggcaacttctttaaaaacctatttggataatgatttataccacacaaaaacgcctgacgaacttaattcgtcaggcgttttttgattgtttatttagtggttgcttttacggcaactgtatcagcttggactgattggcccatattattgaacttcatgtaagcaactgctggcatgtttgtaataatcaccatcatcgctgtttgcttaccagctgcaacgatttgatcaagatcaacggttgccagtaagtcaccatgcttgattgtttggccttcttcaacagcgacttcaaaaggtgcaccgtttaattcaaccgtatcaattcccatgtggactaagacttccaaaccattagtcgtcttaatgccaatcgcatgtttcgttgggaaaatcgtcatgattgtcccatcaactggtgcgacaatcttgccatcagttggtacgactgcgtagccgtcacctaacatcttttgtgcaaaagttggatcatcaacattttcaatatcaatcaattcaccgtttgcaactgcgtaaaagacatctgtctcacctgagttaatatcactatcaacaggggcttcaactggtgcagcagctggttctggtgcgctggttgcgattggtgtgttgtggttataaagttctttcagggcatccgccacaaattgaacttctgttccgataataatttgaatattggttttgtctaagacgttaatcccagcggcaccagcggccttaatagccggttggttaacgttggctgtgtcttctaattgtagacgcaaacgagtcgtacagttatcgattactttgatattgtctttaccaccgattgcagcgtagatccgttttgcttgaatcatgaatttgtcatcagtagcatctgtttcgacaccggcagtatcttcatcaacagcatcatctgcttcgcgacccggtgtcatcaagttgaatttcttgatggcaaagttgaaaccgaagtagtaaataactgccatgactaagccttcaaccaataacatcaatggttggttggcaactggatttttcaaacttaaaacataatcgactaaaccagcactaaatgcgaaaccggctgtccagtggaagaaagcagcgacggctaatgaaatccctgtgaatgctgcatgcaagacataaagtggccatgcgacaaacatgaatgagaattcaagtggttctgtcacacctgtaaagaatgacgcaaaaccagcagctaacatcaatgaagctgttgctttacgacgttctgggcgagcgttcttgtaaattgcgtaggccccagcaggtaacccaaacatcatgactgggaagaaaccagcttggtacatccctgtcttaccaatcacggctgttccgttagcaagtgatttcgcaccgcccaagaagttaccgatatcgttaatgttagcaacatcaaaccagaacactgagttcaaggcgtgatgtaaaccagttggaatcaataaacggttgaagaaaccgtataaaccggcaccaacccagcctagttttgaaattgcttcaccaaatgatactaaaacagtaaagacagctggccaaacaaagtacaagattgctgaaacaaccatcattgctgttgcggccataattggcaccaaacgtttcccactaaagaaggaaagcgccattggcaacttcacgttgtggaaacgattgtacattgcagctgcaattaaaccggcgataatcccgattaaaacattaccttcgattttaccaaaggctggattcacctcagcgatatctgataaaccttgcatcgcttgaattgaggcaggtgctaaaattgtcttagggactaagaaagcgactaaaccagcaagtgcggctgccccatcctgatccttagacatccctagggctagaccaacggcaaataataatggcaagttgtttaaaattgcgccgccaccagctgctaggaaaattgtaaagacgtttgcatttgaatcgccattgccaacccagttagcaatcccgatcaaaattgcggctgctggtaatacagcaacaggcaacattaatgaacgacccattcgttgtaagtaattcttcataaggtgttctccattcattcatttatttcgttaacaatattaaatcattaatgcaaacgataagcaagcgcttaatagtcggtatagacctttaaggtcaaggaataaagcggtttcttaattcgaaaatattttggtctataccgtataacggcattaattattgccttgaaattaaaacggttgcaaaaataatgatttgacgtatactgaaggtacaatttaatcgctttgcactaggggtgttcttagaagaactgagataggttttgtacaacctgatccctttgaacctgtaagttcagacttgcgtaggaaagtgcctttctctattaaaccaacaccacttttctatgcattcgtgcatctaaaagtggtttttttgattttaagggaggttttttgcatgtcaaagacactgttagaccagataaaacaagctaacccgattatcaccaacgttgccaacagcgtcacggtcgatcaagtcgccaatgttcaaaatataatcggtgcatctccaatcatgtctagtgatcctgaagaggccccagaaatggtcgctattgcgcaggcactcagcatcaatattgggacactatccgctgaacccattcaccaaatgaagactttaatggctgaagcttatcgccaagctaaaccagtcgtcatcgatccggtcgcagtcggttcaattcattatcgtcagaaaattatcgatgaactcttagcattgggagcaccccaaattatccgcggaaatgcgggggaaattgcttatctagctggtttagactggcaagctaatggtattgatgcaggcaatggcgaaattgatctcgtaaaaattgctcaaacagctgctaaaaaacagcaaacaaccattttactttcaggtccaaccgatatcatcactgatggtcatcacacgactaaagttgccaatggcacgccacttttccaagtccacgtcggctctggcgatatgctaactggtctttgcgccgcatttgtcgccgttagtcctgacaatccttatcaagcggccatcgacgcagcaacgacctttgccgttgccgggcaattagtcgccgaagcaatgccaacgcctttacctggttctttttatccgcaattattagaccgtttatttaacattacagcaactgagattcaaaaccatgcacaagtcacggaggtcttaactcatgaataatttcccacaagccttaacaatcgccggttcagatagtggtggcggtgctggtatgcaagccgacattaaaaccatccaagaacgccacgtctttgccaccaacgtggtcgtcgcaattacggcccaaaataccattggcgttcaagatagcttcccgctaccgctcgaactagtcaccaaacagtttgaatcgctcgcagccgattttaagatccgagcctgtaaaacaggcatgctcgccgatgctgagcacgtcgccgtcgttgcccaaaacctccggcgcttcgactttggccccttaacactcgatccggttatgattgcaaaaggtggtgcctctctactagccgactccgccattaacaccttacgatcagaactcttacctttggcaactgtcttaacacctaacctaccagaagcagaggtgttaaccggtcaaaaaattcaaacaactgccgattttaaaatcgccgcaacgcaactgcaaaaaatgggtgctaaaaatatcatcattaaaggtggccatctcgataatagtgaccaagcctgtgattacgttctctacgctgatggtagtgacgactggttaaacacaccacggattgcgaccgttcgcacccatggcactggtgacaccttctcggcttgtctaaccgccgagctagctaaacaagtcccactcaaaaaagccattcagattagtaaagccttcattcaagcggccattgccaatccaattgcagtcggccacggtcacggccccacaaatcattgggcttatcaggaggttgaacatgactaatattgcccaggaaatactccaaacttatttagtggctggtacacaagatactggtcgagaaaactttttacctatacttgaccaggctttacaagctgggattacttgctttcaattcagagataagggcccaaatagcttaccaactgacgcaatgcggtccgactacgcccaaaaggcgcaagcactttgtcgtacttatcacgtgccttttattatcgatgatcgcttagaattagctttagatttgcaagcagacggactccatgttgggcaatctgatcaaccatggcctaaaattgaagttgccaagcaacacggcctaattaccgggctatcctgtcatactgctcaagaaatcctaagcagtcatcaacaaccggcgctcgattatattggtgtaggccccatctttccgacgaattctaaagaagatgccaaaacaccactcggtttagcacaactaaaaacattcacgcaactcagccagttaccggttgtcgcaattgggggcattagtttaaaaaactgccaacaagttgctgagaccggtgttgcgggggcggccgtgatttctgctattacacaggctaaaaatattccccaagcaatccaactattaaaccaaccttggcagagctcagaagggaataatcatgaaagttaatcataatcaattcctactctggtttggcgcggctatttcaattgcggaaatcatcactgggacactcattgcgccccttggtctcgtcaaaggcagtctagccattatcattggtcacctgattggtgcctttttattgctattaccggctagttttctcggtggcacgcgtcatcaaaacgcgattgagttaacagacccaatttacggtaaaatcggttttatcctctttgcgattttaaacgtcattcaattaattgggtggactggcatcatgattgctaatgccgcccaagccatgcagcaactcaagctgactcacctcagttatctgatgaatgccattatcgtggctggcttaattattttctggttggcaattaaaacgcaattctttttcaagctaaacaactccatcgtattgctcttagtggttgcttgcctgggccttttttggcaactcagtcaatttgctggtcacaccactcatctgagtgccaatccactgagctttggggctgccatcgagctcagtattgcgatggccctttcttggttaccattaattgcggattataccaaggattcaaaaaagccactagcactctctttatggagtactagcggctactttcttggtagtctaatgatgtttttcttaggctttttaaccattattacgactggctatactgattttaatcagtttctagcaactagtcgcttcggctttttaattttatttatcatcatcttctcgaccattacgacgacctttttggatgcctattctgctggcgttaatctcaaaaacctgttccctaaaatccgttattcagaaaatggcttagggatcgtcgtcacattgattgggttgggcttaatcgctaatcaacaactcttcaaatatgaactctttctcacactcattagcgcagccttcacaccactctacacgattgtcttcttcaattatttctaccgtcgattgccaatcgtcgtcaactttagtggttggcttttaggggcaattgcttattatggcttgcagcactttgatttccccctaggaacaaccgttcttttgatgatctgcctctggttaattttatgctgtatcgctcaagttgtaggtcatcggaaaactaatcgttagcgatttctgcaaagtactgttctttttcgcgggcccagtaatcctcttcggcttgatcaattggtcgtaatacgcgacagggattcccgactgcgataacattatccggaatatcttttgtgaccactgatccggaaccaatcacgacgttgttgacaattgtcacacccggattaacgaccgtattgccgcccagccagacatcgttgccaattgtgattggtttgccatattctaactcatcacgccggccttgtgccgagattgggtgaccagcggtgtatagaccaactcgggggccaaagaaaacattatctccgattgtgactggcgcgacatcaataataatacaatcataattcatataaacgcgttgaccgattgtcgtctgacacccataatccgttcgaaacggtggttcaatgtataaatcggcgccactttgagcgaataattggtgcgtcaattcgcggcggtaagcctgttgttcttccgtagtttggttaaaaagacgcgttaaaacacgggcccgtttcatatctgcccgtagttccgcatcatttgcacggtaaatctgaccgttaaccattcgttctttttctgtcattcaaaatcccccatttccaatgaaagaggtgcgccacaaaataaatttgtgatgcacctctttttgatttctaaactttgacactcgacattaatgctcaaagccaaaccgtttcaaacgcacttttttaatcgtgttttttgaaactgtcttctgcgcctagcgtcactcgttaaacaactgcttccagcagttattcaccgagctgtgctaatgctcaaagccaaaccgtttcaaacgcacttttttaatttaccaaattgtgacgcgtttatccggtgctaaatacatcttatctgcagattgaacgtcaaaagtagtgtagaaatccgctagattttgaacttggacgttcgcccgtaaggcatttggtgcgtggacatcgatatttaatagtaattgttgatattgttgtgtggctttcatccgccaaattgttgcccagttaacgaagaaggcttccaaatcaacatcatcttcacctttagccgcttctagcgcacagcttaagccaccggcatcagcgatattttccgaaacggttagcttgccattcaccttttgatcagcaaatgctaagccatcaaattcggcaatcattgcttgtgatagcgtcttgaaatgatctaagtcagttgcttgccaccaattatgcaagttcccgaattcatcgaactgtgcaccattgttatcaaaagcatgtgaaatttcgtgggcaataaccgctccaatcccaccataattagcactactgctttgttgcaaaccataaaatggggcttgtaaaatagctgctgggaacacaatcacatttttcgaaggtgaatagtaggcgttgactgtcgccgcgcccatttcccattttgcacgatcgactggttgggttaatttagcaaaattttccgtttcaatcgttcgaatgaaatcagctgtattctcaaataacgtgccatcatcagcttggggtacagtcaccaatttttcaaagatcggcgcaattttttctggatagccaacatgaatccctaaatgattgagtttcacaatcgccttttcacgggtttcggcggtcaaccaatcattttgttcaagacgattttgatagacactaatcatctttttcaccattgcttcgacatctgccttagcagttgccccaaagtaacgacggccatagtaatccccaacgacttgattaaacatgccgagcgctaaataataggcgctcttttgttggggcttcgcctctttactacctgatagggcgcgtccataaattgaactaatctgccgcatttcttcatttaagtaaccactccaatcacgaatggtcattacgagtaaccaagccttaaattgggcaaaattatcatcgttgactaatttagttaattgttcaaaataaacgggttcagtcacgataattttatcaggttggactggcaaaatgcggctgaaaagttgtttgaaatcaattgattgttgttgtgcaataaagtcgcttagtggtttaggattatacagctttgcataatctgcggcttcttcggcgctcttcacaaatggtgcgagtgagcggtcaaaagccaacgcttctttaaccgttttagtcgcaacaactggcgcaaagccgaccttttgtagtagttggaccatcatgtcggtaaagactgctaataattgttcggcgcttttgttcccttcatcgtagtacgttttatcaggtaaaattaagctccccgcttcagcgtagagcgcgtggtgtgccgtatctttcatatcggcatctactgacaagccaaaaggtgttggtaggcctgataatacccagtctgccaagccttgattgtattctgttaaattgttaattgagcggacccgtgcaatgaacggtaaaatcggattaatcccgagttcatcacgtgttttaaagtcggccgctagggcataataatctaaaaagtgttgtaataacgcattatccgtttgtttaagttgcttaaaatcggtcattaattgttgatcgatttcatctaccagggccacaaagccaccggttgctggtttatcagctggaatttcggctgtttttaaccattcttgattcactgccgtgtaaaaatcatcttgcattcgaacgtttgtcattgtcatcctcctcaatcagattctaattcaattctaccattgatgccctactttccggtagtctaagcgctttaattattgataacgattgcaatcaaaaacggtcggcattttcttttagaatgatgccaaccgtttttttatttttgcttttccgctttcagcattgcaaatgaccgcataaatgagcgcatcacgcccttgtctgaatagaccaaaatgttcatgcgatagataatcagtgctaaataggtaaggcctatcaacgtgataatcgctaagccaagtccaagcgtggctgctgttgcagttaagtcaccactagcaaaacgcaccggtaacatgatttgtgaaaagagcggtacgtaactcaggatttttaaaaagccgatatccgaacgcgtcgttaagataaacccgcacatataactgattgtactgaggattaataacggtgaaatggcttgttgcacctgatccattcgcgaaacgacagaccctagcattgctgcaatcactgtgtagagtaaaacgccgacaattaggaaactaatcgcataccaaaccggtggtgtccagaggttcggtccgacttgctttaaaatcgccgataatggtaattgttgttttaagtagtgataacccaccacaccaattaggatgtaaaagacaatctgggttaaaactaatgctaatacagcggcaattttagcaaagaattgagttgtcgccgagacacttgagagaatgatttccataatacgcgagcctttttcagtcgcaatttcctttgcgataatccccgcgtaattaacgataaagacaaacattaagactgtaatcgctaatgaaatgccttctcccacttgtttttgattagattgatcaattttttgttgcccagcttcaaactgaacggtcacggatttaaccgtcatcggtgtcattaacttttgaatttggtccgccgggacgttagcttgccgcgcaagggtcacaatattcatttcattcaactggttttgaatgccactcggatcaaaatcacgactatctttccgttcaaaatattggctattgccttgctgaatgattaaataaccatcaattttttcttgtttcaacgcttgagctgcttgcggttgcgtcttaatttgcgtatcaatgacgtaatcttgccctctcatttgttgcaaggctgcttgttcagctggttgttgactgagaaccgcaatcttagctggttcggtggattggtccatcaatttgccgatccctaggacgacccctaatagaataattggcatgataatcataatgatataggccggacttttaatatttttaaagaaaacctgtttaaaaataatcttaaatttagtcatgttgctcacccactttcaatctaaatatttcgtctagactaggcgcttgttgactaaattctggaatataacctgcttgcgtcgcgcgttcgaaaatctctttgccaaccgcttcgtcagctagcgtcaattcaaactggtgaccgtggcgtgttacacgtgaaacaccttcaatttgttccagttcagattgcgttaacggtgattccaagaagagtttcatgcggccaaactgggctcgtacttcatcgatacttccggataacacgacttgcccattgcgcaacatgacaatccggtcactaatcttggcaacattcgtcatatcatgactcgaaaaaataattgccgagccttgcgacttcaaccataaaataccatcttctaataaaccagcatttacaggatccaacccactgaatggttcatctaaaataatgagcgctggtttatgaattaaggtcgcaatcagttgcaccttttgttgattgcccttggataaatccttaaccttatcagtacgttggcccttaacagcaaaacgcgctaaccactcgtcaatttgtggtttaatttccgccgcggtccgcccgcgtaactgcgcaaaatataaaatttgttgttcaacggtcatcttaggatagaggccccgttcttctggcaggtaacctaattgatcgtagtcacgactggtaaatgcatgcccttgccacaaaatcgtcccgctatccggtgttaaaaaattcaatatcattctaaaagttgtcgtcttaccagcaccgttttgcccaataagccctaatatttcgcctggttgaacggtaaacgatacatcatctacagctttcatcgccccaaaacttttttcaagatgcgttaacgttaacatattaatgcctcctcaacatttattaactactttaaccatacaatatcccttacgaaaacgcattattattattgccataaaaaaagagtcaccaactaaactcggtgactccgaaatactcattattgaatttcaatttggcttgttgattgtgtatcttcagccatttttggtaagactaattgcaaaacgccatcctcatatttcgcgctaattccttggcgatcaacttctggtaaataatattgacgactgaagcggccatagtgacgttcactttgaatcaagtttccttctgagtcgctgtgatcgttaaaactatcccgttttgcactaatctttaacgtattgttttgataatcgacgtggatgtcttgcttgttgagcccaggtaaatcaaccgttaattgataatccttatcggtctccttcacgtctgttttcaacaagttgtcagtttcaggcgacattgcaaagaattgtttgccgaaattcttgaaaaagtcatcacctactaaactgtctaaccaatcttgacgacgatccattaattcgtttgccatctctaaaacttcctttctttatcttaattacaattctattttaacgcgttagtcgtctaatgcaagtaattagcactctttcattgcgagtgctaacgcaaaatagttaaccgccctaatttagcattttaattcccgccttaagcgttttatgctatacttaaggttccaaaaatactcggaggtagattcatatgaaaattgttgtcttagcgggcggtcgtagtactgaacgtaacgtttcactaacgtccggacacaagattacccatgcactacaaacaaaaggacatgatgttgcctttgtcgatctttttttagggaatgaattgaaagatggtgccacaatcgactctctttattcatctgatcccgttgaaaaagattatgatattgatgatgaagttttaacagatgacgacatcaataaacttcgcgaagatggttcaacacaactatttggtccgaatgtcttagaaatttgtaaaactgctgatatcgtattcctcgcactccatggtggcgatggcgaaaacggtaaagttcaagcggttctcgatgtctttgaaattccttatactggtagtgacacattagctgctggtattacaatgagcaaaaaagtttctaaagaaatcttactcttcaacaacattccaacagcacgttttgtcgctgcttatcgtcatcaaccaatgccagaaatgccatttgaataccctgttgtggttaaaccaagtaatggtggttcaagtgttgggacacatatcgtccacaacgaagctgaattaaaaccagctgtcgaagatgctttgcgttttgataacgaagccttgatcgaagaattcatcaagggtcgcgaattctcactgggtgtcattaacgaacaaccattaccagccattgaaattgaagtcaatgacggttggtatgactttgaacacaaattcgtaacaggtaacacgacgaaattcgtcacaccacctaacaacttaccagataatgttcacgaagccatgaaacaaatggcgcttgatgccatgcacgcgcttggtttaaccaactacgcccgcatcgatttcttctggagtcctgaaactggcttatacgtcatcgaaggcaatacattacctggtatgacaccattatcattaattcctcaagaagcagaagttcttggtattagctaccctgatttatgcgaaatgattgtgaatggtaaattagctttacttaatgaaaaataataagtttctaaaaaaaaacgataagcctgagggcttatcgtttttttattattaaatactagtggtacccccgcttaatcctaatctaattattcctctttaggaactaagattcaaagaagattagaatcggcacatctagctgatcgtgtagcaactgaatttccttgacggtaaacggaattttaccgcgaatcttacggttagcagttgttagcgttttatttaaaacatcagcaacttcctgctgcttgatgtcacgaccctttaaatatcctgatagcacgaaaagttttcctgccaaatttggcacccccaaatgaatattctcaaactttgctccacattaggaatattacgtcatctagataaacttgtcaattaacgattttgtacgaaagtgttaactttttagcgtattttgtcatatacttagtactatagtttttattgcgagtaagaaggtgaatttaatgtttggacaactattacatgataagcgggtttcacggaatcttacgatgcggcagctagccgatttattaacgcaaaaatacaatattaaggtcagtagctccatgattttccgctgggaaaaaggcgctgccccttcattaaaagcgttgttcatcatcgcgactgaattacaagttgatctcaatcaactcgctgtcatcattgccgacagtaacttaacccgccccgaatctctttcataaatcagtagtacactaaactaatcaaaaaggactcggctaaatgccgggtcctttttttatttcgttttaattgttttaacccctaagacgtccaagaagaacgtgaaaattggtaacccaacaatcaagccccacgtgcctaagaaacgttcagcgacaaagagaacgacaaaggtgaagaaaattggtagttgtgtcttgctcgacataaagcgcggattcaagacataagcttctagcgcgtgaatgacggtaatcatcaacagaatataaatcacatactgcacaccacccactgaaaaagcgatgatacatagtggaatacatgacagaatcacacccgccactgggaccattgataataagaaaatcataattgccaaactcggaatattaggcatcttcatcaccgtcaatgtgatcgttgtgaggaccgtattaacgaccgcgataaagatttgcgcttcaatcacaacaccaaaagtgttcacgaattttttagcaaagtaagcaatatcttggaaaagccaaccgtaggtactctttaagaagagcccaccaaattgtggtaacttatccagttcaatcgtataaaagaaactgaggataaacgacaagacaatcgtcacgcccatcgtaccaatcccggtaatatagttaaccaaggttgaaacaccatgctttaactggtcggtcaaattaaactgtttcatgtattggctgatcagttgcatgaatttattggcatcaaaggatggactctggtaaaaattataaacactttcacctaatttaatcgtttgtttagcgatttgtggcacataaatggttaccccgagatagaccaataaaatcactaaaatgtagagtggtacaaccaccgcggctggtggtatccgaacataacgctgcacgtggcgcaccaattgggtaactaaaaaagtaaagatgaacgtcaacaagatgatattcatcattgaacgaaccgcaaaaataacaccaatcatccccattagaactactaggcgccgtaattgttcgttcgctacaaatcgttggtataaagtcacacgttttcctccctaatctaaaacatatcatcattttacaacacttcgcgttaattgaataatgaaaaatctaaccttacataagtgttatgacttacataatttttaaaataaacgtatactagtttggtattaaaaattttttcctagaaaggattttcggaatgttagaaaaaactttttataagaaactactacaacactcttttgattttccagtcgccgtccacttttgggatggtagtactgacgtctacggaaccggagagcctgaaatagcaattacttttaaaaaactcatccccatcaaatcactaaccagcaacgcctcattagccttaggggaagcctatatggcaggcgatattgaggtgacaggcaaaggtgacgcaccacttcaaaaactactgacagccgcttataacagctcagagagttttatgcgcagtcacagttacattcactttttacctaaacaatcacactcagaaaaagctagcaaaaaggatatccaaagtcactacgacttaggaaatgatttctaccaactttggctagataaaaccatgacttattcttgtgcttatttcgaacaaccaacagatgatttagaaactgctcaaatcaacaaagtgcaccatattctacaaaaactcaatccacaacctaatcggacattgctcgatatcggctgtggctggggcacattgatgttaaccgccgctaaggaatatcacttaaaagttgtcggcattactttaagccaagaacaatataattttgttcaacaacgaattgacgaagaaggcctcagtgacgttgcgtccgttgaacttgtcgattatcgtgaattaaaacacgccccatttgattacattacaagtgtcggcatgttcgaacatgttggtcaagaaaacttggctgaatacttcaaagatgttgcggattacttaacagacgatggcgtggcccttattcacggcattacgcgtcaacaaggcggcgccaagaacgcctggatcaacaagtatatcttcccaggtggctatgtgccaggcttggttgaaaatacgcaacacattgtcgatgccggtttacaaatcgctgacatggaacctttacgtcggcactatcaaaagacgttggagatttgggatgccaatttcaacgcacaccgtgatgaaatccaacaacaaacgagtcttgaattcgttagaatgtgggatctctatctccaagcttgtgcctcatcttttgaatctggtaatatcgatgttattcaatacctcgtttctaaaggcgctagcgcccgtgatttaccaatgacacgtgcttatatgtataacgtctaaaataaaagtgtgtgctaccacacacttcatccaatcaaaaagtcgctatgaacaattgcttgttcacggcgactttttttgtcttcagttatttttttaaaagtgcttcagctttagtccgtacttctgaatcgctcatgctgaggtaaggtttcattgcggcaactgtttgatccgtattgtgaccatttgattccatgtagtggtcccataatgcttctctcacgattgttgcatcgtcgctccagtcaaatgcctctgacatcttcatatctaaaaccaatgttgctgtacctactgccattgcaaaagcctcctaaatatttcttattacactttctatattagtccctttttcaaaaagtgtaccaaaatacgcacttttatttttaaaagaggttcgcaaggcccatcataacgacctgactgctcatcacaagcaatagcaagtgaacaataatttcaaataggatgaccgtgtaaaattgatcgaagcccgccattggttgtcggattaaactcacaacaatcgccatattcacccagagataactcaacaccagtaagatgacaactaaccatagcgccatcaagccagccacaaaagtaaccaacaaggccgccatcgttagtaataagacgaagctcccgtaagcactgatttcagttaaatagcggtcaaagcgcaaatttttttgttttaaaagataccgtttcagtaagtacccggttcctatcagaactaataagccacccagttggattaaaaagaggcgtaattcaagcggccacaacgccactggctgccgtaaaatcacttgcgtgccagtgacaccggccacggccccgacttgttcggaccagcccgccatcaataaactaatcgtcgccgtattaaccagcaataagatggcaaaagttacccagccaaattggggattaaccccccgccatggtgtttgtagcggttgccgccaactcacctgtaaaaattggtgatacttgagtgcggttggtttggcttgagtcgtttcgtgattgattgcagccgcaccgcaatttggacactgctgcagcttgcgaccatatttaatatgacattgtggacattctagcatagtcttgcctcctgataatcctattctaatcgaaaaagcacccaaaacaaaataaaaattgtttgggtgcttttagattcttaacggacaaccattactgagctaggtgcatatttagataagtagctcgcatgcgtaccaattaagtgttttgaaggttttgttttcgaaccacagatgacaagatctggtttgaattcaggaatgatttcttcgacaatcacgtggcctggattgccttcaccaagaattggtgtcacttcttggacaccaaattcttgggccttttgaacgaagatatctaggtctgcggcgatttcttcccgtcgtttagcgaccacgtttggtgagagtgattgatagatatttaaatcgccggtttctaagatgctgacaatccccattggaatttggtacatcttagcgacggtacaagcgtaattaaaagcgcgttttgatgacgttggatcatcatcatcaatcgcgattaatagtttttggtagtgcattgaagtgacttcaatgtttaaaggttgtttttctgtcattttaaggactcctttatttttcgatgacgagtgcttctttagtatgcacaagttgggtaatcaattggttgaccggcgttgggatgccacgttcttggcccttgcgcgcaacgtagccgtttaagtagtcaatttcagttaaacgatggtgttggattaaatcttggtgcattgaaggataatgttcaccagcttgggtgggatcaaataattgatcgatatgcgcaatcgttgttggcacatccaaatcaaccgcttcggtcgctgccactgctgaaaattcagccacaatcgaagccagtaatgagttgacctgactcgtccgaccgagttgggcaatgttacaatccaataaagcacagaggctattcaaggtgccattcacacaagctttgcgccaaattgaaaacaagacatcagcactataggtcgcatgtaaaccagcggcactcaacatcgcgactaattcttcagcggcacctttagcttctggcgccacattttgaagttcaacactgccggaaccactaaggctaatttcaccgggaccggttaaaccagcagtccacaacgtaatgccgacgaaaatattatgtttaggtaagtagcgttcgattgtttcgggatgacccaggccatttaataaacaaacgaccttcgtcttctcaccaatcagcggtttaatcgattggagcatcgcccctagttgcatcgatttcgtgaagatgataatcacatcttgaacgtctttaatcgctgtgggtaaggctgctggaatctgaacgtgttgcacgtcttgccccgcaatcgccaccgttaaacccttggtattaattgcctgaacatgttcgacccagttgtctagtaagacgacatcgttcccggctgcttgtagcatgtagccaaaacggctgcccattgcaccagaaccggcaattgcaatttttgtcatttattcaacagctcctcaactcttatttactgtttaatcatgccatattttctgctttttttcactagaaaccgcttaatttatgataaataaaaaaaagagtgtgctatcagtcggggattaaaaaagttgggccaaaagtgacttttggcccaactccgtttatatgctattgatttgcttgccagttcgcaatattttgagcagcaagtgccaaactcaagacagcatccttagaaaggtccgcttgaatgaggttatgtttaacagtagccgcaacagcgccaatcacggctaagccgtaagtgaggacttctaagtcgcgtttcactaagtattgatcttcataaacagcttcgtgactgtattcaaagttaactttgttatcggctaaaatgccatcaacgtgggttaccatgatccggtcagtaacatccatcaataatttacggtcatctgataaggttaatttatggtctgattcggattgatagtaagtttcttctgtaatatccaagtattttgctactggattattcaaaacaccaaaaccatctaatactgcaaaaatttctgaaacattgaggctaactttacgatcaataattgccgtcatgttttcttctaaccaatccgctaattggcgaacgttatcttgtgccatttttgtgtactcctttaaattatctaaaatagacttttaatcttccctatcatcatacaccatccgcgatttaagggacagtctatcccttcagatgctggggatgatcgtcaattaaacccgcaccttgtaagtaagaataaaccgtcactggaccaacgaattggaagccccgccgcttcatatcccggctcactgcaaccgataatgctgattgtgcagggacgtctgcccacgtttttggtcgattaacgattggttgcccgtcaacaaaagcccacagatagtgcgcaaaactttcctgttcttgttgaattgctaaaacgatttgcgcattattcaccgttgctgctagcttacgccggttgcgaatgatcgctggattttgtaataaacggtcaatatcagtcgtcgtcatttgcgcgactttttgaatctcaaactggtaaaaagcagttctaaaagccgcccgttttgccagcaccgtttgccaactcaaacccgcttggtaggtttccaaacacaatagttcaaataagcgctgatcatcgtgttccggttggccccattcttgttcgtagtaagttaacagctctgctgttgcattcatccaattatcgcttgccatgttcatcgactcccttctacattaaagtacgttaaaaagccacgacaacttgtgctgtcatggcttttttgattacttaaaattattttttgtagggattgttattgacatcagtcttcacaatcaacacgtcacaaatcgctgtccggttaacgtattctgtgacagaacccattaacatccgttcaacagcgtttaacccggttgagcccatcataattaaatctgttttgtattctgatgggaaatcacgtgcgatgacattcttcggattgccaaaacggacgtgaatttcaacgtccatcaaattatcattggtttgaatatcatatttcaaactattgagataattttgtgcgtcttctgagatttggaaaatagcatctccagaaagcatgccgctataactccctgcatattgtttcgtatctaatacatttaaaatatctacttgagcgtgattcatcttagccacttgaactgccttattaagggctaattcagcttcttcggaaccatcaactggtactaatattctcttatattcttgaaccatgctgttcatctcactttctctttatgcacaatgtcacaatgatactacattaagaatataccgctttcgcggacaattcaagcaaaaagaatagcgttttcttaagtgtatcctttaaaaataatccttcttcttcagccaccagccaaccaaggcactcacaattcccgataagcccaatagcaggataaaccccttgccactatgcgttagcggcaccggcacattcatcccccagaaaccaccaataatggtggggaccgttaaaacaatcgaaatcgacgtcaacgtcttcatgatgttattcaaacgattggaaatgatatctgataataaatcacttaattgttctagcaaagcgcgataagtcgtaatcgccttatctgatttagcaaactgtaaatcgatgcgataaaggcgatctttttgatcagccacttcttcaaataacgccgcctctttaatctgcggtaagctctgctgattactttttaaacccaaatccaagtaaacgacactctttttaagtgctttgagtgcgtataaaatttgattccgcgtcgaaatatggacgtttttctccaactgatgaatctgttgggcgaccacatctaaggcggtcaaataacgttggtaaatcaacgagatactctgcaacacaatactttcgacctgttgatcagtccccgtaatgcgctgcatctcggccaccaattcactttgttggtgcccaactgtcagtaaggtttgcccactgatgataaatgaaaacggccgcgtaatgtattcggcatgtttttcagaatcatgggttttgaccggcactaacaaacaaatgtggctgagtgtttcacccgtttccgtcgtaaaagtttcataccgggccacttcattgatatcttgggcgacctcaaacaacatgcgcggcaaatgatacttccgcgcaaaatgctgcatttcatgcttgctaggatcttcaaagtgaatccaatgggccgctttttccgagcggttttcgtgaatctcaccggtcgtctgtatttcgaaataggtaatcatttatccgtctccgcccttttcttcttatcatacgagctttcctacacagttgacaagtaacagtcatgctaatagtaaatatgctacaataaatctatacgaaaatagggaggttttagagatgacacaacggattttaccactcgaaaaaggccataactttagagaattaggtggctatcaaacaactgatggccgcacgcttaaatggcataaattactgcgctcagccaacttagcccaccttactgatgcggatttaaactatcttgatcaatacggtttgcgctatgatattgacttgcgttctgaagatgaaaaagccaaagcgcccgatcgactacccgctaatgcgacttacgaattcctccctgtttttgccgttgacgaaactgccaattcagcgagtcaggatgaactctatcaactctttagcaaggaccccctcagcggccacacccggatgcaaaaggtttatgacaatttgattaatcagccccattctaagcaagcttaccgccgcttttttgaattactgctcgccaacgatcaagatcatcaaacaacccttttccactgtacggctggcaaagatcggaccggcatggccactgtcttcttactcagtgcccttaatgtgcccgcagagacgatccaagctgattacctgctcactaacctcgcatcggctgattttgtgcagaagtccttacagcgcctccaacaaaagacggcctatcaaggcatttaccaaagcgttcaatccttattgaccgttcacttggattatctccaaaccgcccaaatggcgattcgccaagaatccggcacaattcaaaattacctcaagactgaattacaactaaccaatcatgatttaactgacttacaaaaaatttacttaatgtaaccgaaacaaataaggagtcccattatgccaactttaaaagaacaagtcatcgcggccagtcgagaaattggcatcgataaaattggctttacctcagcggcgccttttgactatttagaggccagcttaatcgaacaaaagaaaaacggtcattctagcggttttgaacacaaagtgctggaagaacgcctctatcccgaattgattttcgaccaacccaaatcaattatcgccatcgcgcttgcttacccaaccaaaattcacaacaaacccgccagaacaggtgctaaacgcggtagttttgcacgggcttcttggggcattgattatcacgatatcttacgggacaagatggcccaattaatcgacgcgatcaaagaacttgccgatgaggatgatgaagtcactttcaaaccaatggtcgatacgggcgaattgagtgacgtcgccgttgcacaacgtgccggccttggttttatcggcctcaacggattattgattacccctgaattcgggtctttcgtctatctcggcgaaatcattaccaatattccgtttgaacctgatacccctatggccaaccaatgtggcagctgtacccgctgtatcgattattgtccgcctagcgccctattaggtgacggtcggttaaatgcgacacggtgcctttcttatcaaacgcaaacaaaaggctttatgccagaagaatttcgccctaaaatccggagcgtgatttatggctgcgatatttgccaacaagtttgtccttttaataaaggcaaggacttccacttccatcctgacatggaacccgatccagaagtagtgatgccagagttacaaccactactaacaatcagcaataaagaattcaaagttaaattcggccacttatccggttcatggcgaggaaaaaagccaatccagcgcaacgccattatcgcgcttgccaacgtcaaagatcgaactgcgattccccagttattgcaattaatcgataacgatccccgacccgttattcgcgggactgcggcgtgggcactaggccaattggtcagagatgtcacgcctgagatgttagacttcttgcaacaagccgctgataaagaagaagaacctgaagcccaagtcgagtttcacaaagcattattaattctcaatgaacgttttgaagagaggtaggctccttagcacatgcaaaataagcaacaacagacgcaactcacacaaccattgattcttttaatggcttttatcacgggggttgcggtttctaatctatattatattcaaccgattcaatctctggtggcccaaaccttccacgttaacactggcgccattggcacggtcgcgatgttaactcaagtcggttatgccctcggcttattattaatcgtcccttttggcgatgtcatgagtcgttaccatttaatcattcggatgctgattttatcgctactatctttgttagtcgcctttttagcgccgaacttcatcttattcgcactttccggcttactgattggcttaacctcagtcgtcccacaaattatcattccatatgcagccgttttagcggcaccccaaaaacgcggcgccgtgctcggaacgattttaagtggcctcttaatgggggttttactttctcggagtttcagtggcattatcagtagctacgtcaattggcgctgggtttaccttttagccgtcattgcgattggctgcctgattatcttagcggccgtcaaattacctaaagattcgcgtcccaaaaacgggcctagttattggcaaaccatcagttccttacctggtttagtgcgcacccaaccacttttacgcgaagcggccattaacggcttcttcatgtttgggaccctcagcatcttttggtcaaccctcgtcttttacatggcaagtcctgcctatcatcttggcagtggcaccgttggtttattagccattctcggtgcagccggtgcgcttgcggcccctgtgattggccgctttgccgatcaaaagacgccgcggtttatcatcgcagttggtctcttgatgatgactgtcagttacctcttattccttttctggggacagtatttgccagttatgatgctcgggatcgttttattagatgttggtaatcagtgtggtcaggtgtccaaccaaacgcgggtccaagccttaggcgaagctaccagcagtcgtaataacacggtcttcatgtttgcctacttcattggtggggcttccggctcatttttcggcgctcttgcttggagtctcggtggttgggcagctgtttgttatctagcgcttggctgccaaatcgccgccttgcttgttcattttgtgctctaccggcctaaagcagcacgctaaggttatgactcacgctagcgtttcccaaaatgttataataaggttaaccaatcaaatttggcttattaattcacaataaggaaggtgtctattatgaaattatatcaagctctaacacaagtgacgctcaatgcgcagatggttgacgatttagctggctttcaaatcaaaccaatcttggaaaaaccgttaaacttcgatccaaccgacttgtatcattacatcgacacgaccttaaaagctggttcacgccacgatgaaaataatctgctatttgtgaccgatgcgatttttatcactgaaaactttaattttaaaggcaccgtttttgaagcctatgcccagagcttcgaagaacgcgtcacccttgcccaccaaattgtggccgatttaaaccgccacgtctcagtcaatatcgacttagcaaaacacgaattccaattagtctttgtcgattaatcactactaaagaacctctggcataaattgtcaggggttcttttagcacgctatttagaaagaagtcctatttttgcctaatgctcagcgccaaaacagcgccctctacaatttgacacgcccggctaatcaactcactgccgagcaacaccaactcaaaaccgccattattaatttttgcgaacaaaatcgtaatgcagatcacgccactttcttgattaaaggtgccgccggaaccggtaaaagtgtgattttaaacagcgtcttctcgacgctccaagaacttgcacgtaaaacgccgacttcaccgctgtaccaaaccaacaacaaattactggttaatcatccagaaatgttgaaactctaccaaaataacgttcaaccaactaacgcgctcttgaaaaaagactttcaacgcccgacaacttttatcaactaagccagcaaacaagagacccgcgccgatatcgttttagtcgatgaagcgcacctcttattgacgcacagcgatccttataaccacttcagacaggataaccagttagacgagattcgcaagcacagtcgcatcacgattctcatttttgatgaacaacaggtccttaaggtcaaaagttattggcaacaacaacagctactcgctaaactccaaaccgggccttatcaattagcacagctacaccatcaattccgaattcaagcaaatccctcggttgaatcttggttacaagcctttcacaaaatgcagatcgaagccttgccccaagatccgcattttgaattcaaaatttttgcagacgcagcccaactgtacgccgctattcaccaacgtaatcaagacagtggtttggcccggttactggcaacctatgattttccagcaacactcaatgatccacacgaccattacgtgagtcccccgcattttaaattacgctgggatcggtatcaaccaaccgccaagacttattgggcggaacgtgaagatagtattgatgaagttggttcggtttatacaatacaaggtttcgatttaaactatgccggcgtcattttaggcccgtcaattggctatgacccacaacaagattgcttactgatcaaaccggaatactatgaggatcaagcggcttttgccggtgccaatcgctttgataatccaacccaaattaagactcaaatcatcctcaatagcctctacgtcctgatgagccgggcccgcaacggcctttacctctacgccctcgatcccgctttacaaaaacgcttattagcgttacaaacggcaacatttcccgggcaataaaaagcactttcctactcaaaaacaaatcaaaagtgtaaaattgaccctgtaatcaattctgttcaagaaggagtgctttttaaatgacgacattaacaacaacttatacgttagcaaacggcgttcaaatccccgtgctcggctttgggacttggcaaacaccagatggcgacacagccattaaatcagttaaggcagcacttgaagcgggttaccgccacattgatactgcccaagcttaccaaaacgaagccagcgtcggcactgccatccaagaaagtggtgtggcacgccaggatctctttttaacaactaaaatttggaacgctaaccacagctacgatttaacaatgcaatctttcgaagaatcacttcaaaaattgcaaaccgactatgtcgatttattattgattcactggcctaaccccattgatttccgtgataactgggaaacagccaatgccgaaacttggcgagcaatggaagaactctacaatgctggcaaagccaaggcaattggtgtcagcaacttccgtgcacaccacttagaagccttgaaaaagaccgctaaggtgcaaccaatggtgaaccaaatcttcttagcacctggtgaattggaagctgatacagtgcaatactcacgcgataacggtctgttattagaagcttacagccctcttggcactggtaaaatctttgatgtgccagaaatgaagaccctcgctgctaaataccaacgctcaattccacaaatcgcattgcgctggtcattgcaacacggtttcttaccattaccaaaatcagttcacgccaactacattcaagaaaatacgcaactatttgacttcgaattaacacctgaagacatgcaaactatcgatcaactcgatggtgttgttggtaaagccaaagatcctgatacagcaaccttctaaagatactctctctaaagagcagccgcgtgaattgacacgtcgtttgctctttttatatgaacagcctttaattaaaaaatgtcgtttacaaaatgtagtttacctccaccattaattatggtattttcattatgatatatcagaaaatcagacttatgaccgacgttatttaccgttgaacgttcgaaaatggtaagatagcattaatgatttaagaaatggggaattatattgtcaagtggtcagatatttaccaatctgttcgtcatgctcgttaccttctttctagcagcttttttcgttgctgcagaattcgcactcgttcaaacacgtccaagtgccttagaagatgcgattcattccggaaatggtagtcctaaaaaattaaaactcgcccttaagatgactcaaaatctcaatgagtatctttcaaccacgcaagttggggtcagtgttgcggggattatcttagggtggattggtgaatcaactgtcgaaacagtgttagttgacttattaggcttgacgcatcttgtctctgagagcggcctgcacattatcggcgcagtggccggtgttttagtcctaacctatttagaagttgtcttcactgaaattgtaccgaagaatatcagtatcgatatcccaatgcagatgttgatggccgtagctaagccacttcattactgtcacatcattttctacccatttgtctggttactaaatgtttccgcaaacggcgttgttaaactgatcggttttgcacctgctgacgaaagtagcgatgttttatcacaagctgaaatcatcagcctttctaaaaacgccgtaaccggtggtgaattggatcgcaacgatttagtttacatgcaacgggcctttgattttaacgatcgaattgccaaagacgtgatggtcgatcgaactagtttatacgtcgtcgatattacagataccgtcaaagacgttgttaaggattatctccaacaaggctttagtcgcttcccagtggtcgctgaaaatgataaagataaaattctcggttacgtctacgcctacgacttggtgcgccaagcacaagtcgatgattcaatccgcgttagcaaattactccgctcaatcatctctgttcccgaaacaacaccaatccatagtttattaacgcaaatgattaataaacaaacaccgattgtggtcgttgttgacgaatatggtgggacgagtgggattgtcaccgataaagatatttacgaagaattattcgggactgtcaaagatgaaatcgatgacgtttcggatgaatatattatcaaagaagatgacaaccgttatcgcgttagcggtaaaacaacgctttacgattttgaacgcttcttcaaggcagacattgaagccttcgaagcatcagatagcgtaaccgttgccggttatgtcttggaaaacttcgctaacttacatcaagattccgttgtttcaattgaccgcttcgatttaacggtcgctgaatttaaccgtggttacattgattggtttgaagtttccgtcaatccacaacgtgcagatacaacactttaaaagtcaaaaaaggcgtcgacataattgtcgacgcctttttaatcgctttaaattagataatcgcggctccaaatgatgcccatcaccttttcaccagtgtgaaccccaacaactggtccgatatgactggtttcaattggcatccctgggaatttggtcgtcagggtctcaacccactgcgcactttcttctgggttattcccatcgattacgcacgcacgaatcggataatcagcggctgccacggctgcttcaaaatccgttaacactttttgaaaggctcgttttttcgtccgttccttggtcaacgcaacaattttgccagctgtatcgaaacttaaaattggtttgatccgtaataagttgccgacaaaggcggccccgttagaaatccgcccggtccgcatcagatggctcaaatcatcgacgacgaagtaaacaccgattgtctcccgcaaagcagccaatttaggcatgatggtttcagcgtcttcgccttgggccactagccgcgctgcttctaatgctaggaaagcttcgccagcactcgtaactttcgaatcaaatggataaaccgtaataccttcgacttggcgagcataagcttgcaggttattgataaaacttgtaatcccactcgataaatgaatacaaatgacttcatcgaaaccatcttcgatcagttggtcaaaaaccatctgcatttgccccattgtaatttgggacgtagttggtaatttatcggtggtgcgcattttttcgtaaaattcagtggttgaaatttcaatattttctaaataagtttgttgaccaaaaatcaccgtgatcggtacaacgatgatttgattggcttgcgcaacctgaggatcaaggtaagcggcgctatctgttacaattgccgttttcatgtaagactcctttgtaacactatttcttgccattatcccaccttaatcctgaaataacaagcaagcaaaaagcagtgtcgcctttggacactgctttttaaaatagtccctattctgttattttttcatgatcaaaaacgataattggcacccggttatcaacgacaccgctgttattgactaaggttaatacttggcgtttttcatctaaatcaaggacctcgtgaccgtcaaaatagtcggccgtatatgccttatagtgaatagggcccatttccgagtcaaacgtttctgtatagctctttagatccgcatcatttggtacaattaataaacgaaaatcagtatctaatgaacaaaaaccaacctttgagaaggggccgacaccgtcatttaagtcgagtaataatgcttgatcagtcgtcatctgtttttgaatcttctcttgagctgctgctgttatttttaataccatattaatcatccctttcatacgtttagcttaccaccatttagattttacacaatttatatgctcacagtgagtgtgctacaatagttatagtacttatctatccaggaggcgtttcgatgcttttttatcgttattcttatttcatcaatcaaaatgatttcgagttctatttcaaaatattactctcactgctcgttgggagtttaattctcattttctttgtccaatacctacgtcaccggtccgattcaaaatatcgggacctcttgattatcttcgtcttagtcggcgttttgctcggtggtattcagtatacaagagtggaacagctcaatactgcgcactcacaacaagcacaaatgacgcagttcatgaagagcattgctcaggcacagaaagtaccggtcaaatcggtttccgtcaatgccacttcgcttcaacaaaatatggtcgtcaaaattcatcagcactactatcaagtggttttcgacaataattttaccagttaccaactaaaaaaagcacaagtcatcaaccctaaaataacctaccaacaataaggagtcagccacatgccatcttatttagatatcacaattaaacttattctcggctttttctgcctcgttttacaaattaacctctctggtaagggtaacttagccccttccagtgggatcgatcaacttcaaaattacgtcctcggcgggattgtcggcggtatgatttataacgccgacatctcgtttatccaatttttcctcgtgctcttaatctggacgctaattgtcttcaccatgaaattcctaaccacacataatcaacgaattaaacgttgggtgatcggcgttccccaaacgattatcactaatggccacatcgatgcccaaacagctgccaaaaacagcttgtcagcccaagatctcgcttttaaactcagaattgccgggattagcgatattcggaccgttcaacgagcaattctagaacaaaacggccaactgacgattacccaaaaaggcgacgcaacaatcaaatacccactgattatggatgggcaaatcaacgtcgatgcattaagtttaatcgacaaagatgaagactggttactcgctgatatcgcccaacaagggtacgaactacaacagatctacatggccaattatctcgaccaccaaattgtcatcacggcttattaaataaaaaaaggtgcgggaacgaaagtcactttcgtcctcacacctttttttggttaacgaaccttctggaaaatcttcgctagaatccacaaaacaaccccgcaaaccaatgtgatcaggctgatttgccaagcgtaatccaaaacgcttgttgcatagttaataatgactgtattgaattcaccagcacgttgggcaacttcttcaattaagccactgaatttggccgtttcagtccctaagaggaggaataagccactccaagcaagtgctgcgcccaaactcccgaataggtagcggaacttcccactgactgcatattggacgattaataagacgatccccatgataatcgcaatccacatccctatgttaacgacacttgtcatgatggccaattcagaaaccattggtgccaaataaggcgtttgaatttgatcatttaaataagtcttcaatggtggttgaacagccgccaccgccgttttgactaaagcttgttcaatggggttgctgggaatcgccgctgttaaattcccagccatttgttcaaccatttgatcactatctaatggccgatctttgaacgcatagatgttcttaacggtcttagtcatatccgttttaacgtctgcagttgagagcaattggacttgaaccgattgcggtaagccatttttttgcgccgcatctaataagactgtattgaattcgtttgtcacgagtttcaaggtcttcggctgattaagttgttcttgggtgaatgattcttttaagactgtttgatttaaaatgatgccgccaatcccaaagaaggcacagcaaaaaattaaaaaagtcagaaaacggctgagacccttattcggtcttgtcgtctttggcgtttgatcaagtcgactcatatttgtcatcgtatttttcctttcgatttcacagttatccttaaattttaagactaggcatatcaattattaaatgctacagtgagtatatagtatcgttcacaggaggcacttcaatgatcactaatctatccattttatatatttcactagctggtaatacccgttcttttgtttccgatttacaagactatgcgcaacaacaacataccactaacccggctttgcctactatttcattaactgagatttcagatgcaaccccctttaaggatgaaacagaacccttttacgcttttgtgcccacatacttagatggcggcaatggtatcgataacggcgtcaaagaattgatgaccaacagcttaggcgaatatatcgcttatgggcataatgctgatttatgttacggcgtgattggcagtggcaatcgtaatttcaacgaacaatattgcttaactgctaaacgctatgccgaacagtttaacgtccccttcatcgcggattacgaactccgcggtaactcacgtgatgttggccgaatctacatgttattagtcgctaatgcgcaaaaacacgcttagagcttcaaattagcgggtaacgtcgtaattaaatcagtcggttgggtcacaatttggaccgcaccggcttttttcagttcggcgatactcccgaaaccataactgacaccaacagccgccatttcattttgtttggcaccaaggatatcattttgacgatcgccgaccatcaagagtggttcggtcttcgttaataaaccaagttctgccaacgcataagtgataacatccgcttttttaacccgcgttgtttcatcaacacttgcaccgtagacaccgctaaagtaaggcgttaactctaagtggtcgataatcttcttggcaaaaggttcaggtttagacgttgcaatcgccaattgtaaatcttgtgcttgtaaggctgccaatgtttcgtgcatgcctggataaagttcattttcatataagcctttaggcgcataatattcttggaatgttttaatcgcctgttgcgtcgctgcttcatctaaaccaaagactctcatgattgtttcgttaagtggtgggccaataaaactaattaattgggccgtcgtttgcgttggcaaggccaattcttcaatcatgtactctaaggcattgataatgcccttttgtgagtcggcaatcgtaccatctaaatcaaataaaactgttccttttgtcatcgattctcatcctcaatccctttgaatatactttattttagcatactatttttaccttaaactttccttattctttttttcataaatctataaagtgcgcttcacagaatcttcacatttccccattatagttatgagtatagaaaagcgatacttttctatttcatactacttaactttttcattttactcctccaaagtaaaataccggtgaagcgtggcttcaccgcacagattatccccccaaaataatctgtaaaacccttactcctttttagatcttcggatctgcaaaaagtcggtccccccaagaccgactttttgtttgcataaaaatagctagcgattaaaccgacatcggccaatcgctagctattttttatttcagatgggcctgcataaatgtgacggtgtccagttgggcctcgtcagatactttatgttgaccattattttcagtcgtcaatgtaacttgttttgttgccggtgtttcatcttcagtaatctgcgtgatgaaatcagcagtaaattggtagggcaccattggatcagcggtcccgtgataaaaatggagtgggcgacccgctaagcgctcagcatttaatgccaaatcatattctgctaaatctgcgagtgtcgtttcaatttgattttggtaccgttcttgaatcgattgtggtaattgactggtttgccatttggcaaaagcaaccggcattggtgagccaatcttatcaacaccgactttaacgttgggataatgagctaaaatagcatccgttgtaatcccacccattgatgtgccagtgacacccaggcgttctgggtcaactaagccttccgcttgtaatgcagcgactaatgggccaaattcatcgactgattgcatcacaatctgccagaattcaaacattaattctgaaaacatttggctaccgtgacgtttaccatgatacttagcatccggtaaaacaacccgaaaacctgctttagcgagaaagttagccaacatcaattcagattccttccgatgcgtccaaccgtgatagacaaataccgttggtaacaaggtttgttcttgcccacccggcgtcacaattaacgtgctgacggcgccaaattggcgttcttcgatactaatcattcatctgtctccctctttttaatttcccgggcaatactacccgaagaaagtgccggtaatcttataacgacgcttgatatagatccggactacgattaataatgccgcaatcacgatttgaatccaggctggtaagactgggttcatgaaacctggaattaagattgtcaccccatacgcggcgacaaaggccaaggttaaaccgacaacgattaacgccatcttccagaatggtgggcgttgttccttaggcatttgtgtatagcgcattggataagtcatgataacgccggccatcgcagctgtaatcacgattgaggtaatcccaatcattgcatttgaattcttgcttgaaaattgcgctgcaatcccgttgaaagctaaatacataatcaagaaaatcaaagcattatccagcatttgtaattgtaaactcgttttaacgggtgcttttggcgcatgtaacaattgattaatcttcgtgctgactggcccgtaaatttgcgttgcgggttgtcctttgtgttgtgcttcaagcatttcgggtaacatttcagcaagcatttcagcttgtttttcgtctgaaacatcttcttcttttaaagcacgcttgaatttaaataaatagtccgcgtttttcttacttaattgtttactgagcgcgtcaacatccacttgctctgtttctactgctggttctgtcttagccaattgttctcctcctcaaattaaacgttgaatctgaactcgataatgtcaccgtcttcgaccatgtattccttaccttcaagccgtaaacgaccagcttctttaacagcctgcattgaaccgtattggtcaaggtcagcaaacgaaactgtttcggcccggatgaagccccgttcgaagtcggaatgaatcacaccggcagtttgtggggctttcatgccttgacggaaagtccaagcacgggtttccttgccaccagcggtaaagaaggttgcaagccctaataggtggtatgaagcacggattaatttatccaaacctgattcagtaacgccttctgcttctaagaattcagctttatcagcgtcatctaatgaggcaatttcttcttcagttcttgctgaaatcgcaattacttctgcgccttctttagctgcaaaatcttgaatttgtttaacgtaatcaacgctatcaggatcggccattgcatcttcagcgatgttagcaacgtataagactggttttgacgttaataggaagaaccctttaaccatcttagcttcgtcttcgttaaattcgattgaacgaactgagccgccttcttcaagaacgggtttgattttctttaaaacttcaaattcagccaaagcttctttgtccttagtgcgggcaatcttttcaacacgcgcataacgctttgtgacgctttctaagtcggctaagctaagttctaggttaattgtatcgatatcgtctaacggatcaacagtccccgttacagacgtgatattatcatcgtcaaaagcacgaacaacatgcacgatagcgtccacttggcgaatgttttccaagaatttattccctaaaccttcacccttgctagcgcccttaacaatcccggcgatatcggtaaattcaaaagtcgttgggacaatcttcttagcgggaatgatttcttgaatccggtctaaacgtttgtcaggcacttcaaccatcccaacgttaggatcgatagtcgcaaatgggtagttcgccatttcggctccggccttagtaatggcgttaaataaagttgattttccgacgttgggtaacccaacaattcctgcagttaatgacatagttttttacactttcctttacgttaaaaattagtttgattgggaccttttgacaacaattgataatgtggttccgttgttgtatcaacatcggcagctgcaaccaacactttcttttgcttcttttcaaattcccggcggggtaataagaccgcgtgtccgcagcccatacatttaattcgaatatccatccctaagcggaccacttcaaaacgattggtgccacaggcatgttgttttttcatctgaacgagatcgcctaatgcatacatcacaaatgtctccttaatctaatcaatattgacatctagtaaagccaagattcggtttaaatcctctaccgtgccgtaatcaatttcgattttaccccggcccttactattcatcgcaatattaaccttggtatcaaatttatcgactaattggttttcactcgcttgaatgtaaggtgatttaatcttagtcttagcgactttagccgctttggtttgattcatttggttgacgagttgttctaattggcgcaccgttaaactttcggcaatcgtccgcttggcgagggcgctaatttgactctttttcttcaatgataaaagcgtccgtgcttgtcccattgagagttggccttcttgcaacaattgcttaacgtctgctggtaagcccaacaggcgtaagtaattggcaatgtaagggcgactcttgcctaagcgttctgacacttcagcttgcgttaagtttaactttttcaaaagggtgtcgtaggcttgcgcttcttctagcggtgttaaatcttcccgttgaagattttccaagactgcaatttccatcatcgcttcttcatcgaattgacgcgtaatcgctggaatcgtagttttgccagctaatttagaagcacggaaacgacgttcgccagcgattaattcgtaaccattaatgcttttacgcacaataatcggttggaaaacgcctgattttttaatggaagcagcaagttccgctagtgctgcctcatcaaacgttttacgtggttgataaggattaggacgaatatcctcgagggcaatctcttcaacgagttcatccgcacgattcttattgggtccttcaaatgctgaaaaaacagcttcgagtcctcgaccgagtcctttaccatttttattgaccattagctgctaacacctccttggctaattcttgataaacttcagccccacgagatttaggatcgtaatcaatgattgaaaccccatgactgggtgcttccgctaatcgtgtgttgcgtggaataattgtatcgtaaacgcgatcgccaaagtacttgcgcacttcttcaatcacttgggcccctaggtttgtccgggcatcgtacatcgttaataagaccccttcaattgcaaggttcgggttgaaatgcttctgtactaaccggaccgtatttaataattgactcaagccttctagcgcataatattcgctttggactggaatcaaaattgaattgctagctgtaaaggcgttgattgataattgacctaatgaaggtgggcagtcaatcaagacgtaatcgtagtcgtttaaaacggcttctaaaccaagttttaaacgcatttcacgggccatttgggccgttagttcaatttctgcaccggctaattgaatcgttgccggcacaatatcaacgtgctgatgatttgttttcaaaattgcttctttaattggaatttcatcgactaaaacattataaatatctttttcaacttgtgatttttgaatcccgataccgctcgttgcgttaccttgtgcatcagaatcaatgattaacactcggttacccgcatctgctaaacaaaccgctaaattaatggtcgttgttgttttaccaaccccgcctttttggtttgcaattgaaataacatgcgccataatgtgcctccctatttcttaggaatttcgattgtgatccgataaacgtttttttgatcgtcttcgactgctgaaactggaatcccactttgttcaatcaattcgattgattttttgatggtattaacggccactttcgtgtcagctgtcgtcatttctttcttaggcgccttcttcttgccagcctttttaggtgtttctgttgattcttcaatggttgctggttcttcttcaacatccgccacttcttcttcaacggctggttctgggttaataattgaagcgactagggcttctgtatccttaaccgttaattgttccgctaggatttggtgtaagaccatttgttgattgaattcatctaatttcaacaaactccggccatgacgttctgaaatttcatgattcatgatggcttcttgaactggttgtgagagtttcaatagtcgtaatttattagcgacaaatgattggctcttacccattttttcagccaagctagcttgtgtaaaaccgtttaacttcatgaggttttggtaagcatctgcttcttcaactgccgttaattcttcccgttggaggttttcaatcaaggccattgaagctgtttcatgatcatccatcttttggacgattgctggtaattcagcccatttcaaggtttgaatggctctaaaacgccgttcaccagcgatgatttcaaacttttgatcttcatattctcttaaaacaattggttgtaataaaccatgttgttcgatggtgcttgccaattcaccaatgtgatcggcattaaaaaccttccgtggttggaaacggttcggtacgatcgcagcaactggtaccattaccacctgattaacacttgaacttgtttcttcttttttcttaccaaaaaatgaaattgccattatttctcctccttagccattaatggttttttaaccggcacacccgcgcgccgtggatatttatctggtgttgattgaaccttatcgataattactaaatgtctgggatcgttagtttcgggtaagttaaacgcgatatcttcttttaactgaccacctaacgtctcaattgcaaaagcggcttccgctaattcagtgtcactttgactcgcctttaaagcaacgaactgcccacccactttaacagcgggtaaacagaattccgctaaaacgttcattggggcgaccgcacgagctgtcaccatatcaaattgttcgcgatatgggcgcttaacttggctgaataattcagcccgatcatgcacgagtgtcacatcagttaaccctaattcggctactaattcttctaggaagtgaatccgtttatttaatgaatcaacaatcgtcacctttaattgagggaacaagattttcatcggtaatgatgggaacccggcaccggcaccgatatcacaaatattgaggggcatcgttctcaatgattccaagtataaggttggtgcgaccgaatcaaaaaagtgttttaaataaacggcttctttttctgtaatcgccgttaaattaacgttttgattggtagccactaaccgttcgaaataaatctcaaactggtctaattgtttttgtgaaacatcaatttgatgttctttcaatgtcgcgacaaatgtctttggtgtcattgcttctcctcttattactagcttaattgtatgctgaatctgtggaacatttattgtttcacgtatacaatttagtttaacgtaagtaagtctaaaaaacaagggacggccatcaatcgattccgtttcatgtggaacaaattttttccgaatattaggaacattttacagtgttattcgttttaacattcagtaagtaagcagttttatcagaatgtggcgactaccctatcatttaaaggcgaactatcgctagtttatgcgattattatattcgttttttagtcatattctaattgaagtcgcccaaagcgtgtgctaaactggatattaaataaattttaacctatagatatggagggacacctgtggcagatttccagtccgactcagcacgtactattgaaccagctccaaagctttctcatattaaagcggccattttaggcctgcaacatcttctagcaatgtattctggtgacgtcctgattccattattagtcggcgcagcacttcactttaacgccgcacagatgacttaccttgtctctgtcgatattttcatgtgtgggatcgccacgttactccaattgaaacgaacacctttaaccgggattgctttacccgtcgtcttgggctgtgcggtcgaatacgtcggtccactaactgctatcgggactaacagtcaattagggattgacgtcatgtacggtagtattatcggcgctggggtcttcatcctcttaatttctggtgtggttgcccgcttacgctggttattcccaccaatcgttactggttcattaattactttaatcggcttcactttaattcccgttgccttccaaaatcttggtggtggcgatattactgctaagtcatttgggagcgtcccaaacttaatcgctggtttttcaacgattgttctgattttaatttttagcatttggggccgcggcttcattcaacaaattgcaattttaatcggcattatcggtgggacattagtcggcgctgctgtcggattggtttcacttgatccagttggccaagctagctggtttaaactaccagaactcttctacttcggtacaccacggtttgaatggacgtcaatcgcatctatgtcattggcagccttaaccacgatgatcgaatcaatcggtgttttcttcgcacttggcgaaatcgtcggtcgtaatatcacaagtaatgacttaaaacgcggtttccgcgctgaaggattagccgcaatcttaggtggcctgttcaataccttcccttattcaaccttctctcaaaacgttgggattgtgcaattatcaggcatcaaaacaaagaaacctgtttactattcagctttcttcctcatcttcttgggtctcttacctaagattggtgcggttgccacgattattccaacctcagttttagggggcgcaatggtcgtcatgtttgggattgttgggattcaagggattaaaatgctccacaaggttgatcttgaagacaaccgtaacctcttagtcgcaaccctttcaatcggtatgggccttgggattgccattcacccaaccttactacaagctttaccagctagtgtccaaaccattcttggtaacggcttagttgtcggcagtttaacagcggtgatcttaaacctccttgttaactaccgctcgttaattgaagcaaaacatcaacaataagcatataaaaagcgtcagacaaattaatttttgtctgtggtgtttctggtgtttctggtgtttctggtgtttctggtgtttctggtgtttctggtgtttcttcagaatcggtctcgccggttgaatcgtcaagcttttctgtcgatttttcagctggatcgtcagcttccttttcagcagtcgttgcttgttcgtcgactttttccggttctttttctggttctagcgtgaatgcttttttaatgcgatcaaataatcccatgtcttacctcctaggcggtttcgtgttcttctaacgagacggatacgatcttcgagatgcctgattctgccattgttaccccgtataaccggttggcttgggtcatggtgcccttacgatgcgtaataacgataaactgcgtctcactctcatagcgtttcataaaacgaccgaagcgatcgacattggcttcatccaatgacgcttctacttcatctaaaatacaaaacggtacgggccgcacttttaaaatggcaaataacaacgtaatcgccgttaatgcgcgctcgccacctgataacaggctaaggcgttgtagttttttgccaggtggttgtgcaatgatatcaatcccactggttaataaagcggatgggtccgtcaaggttaatgacgcgtgcccaccaccaaacatcattgggaagatttcttcaaaggccgctgcagtttggtcaaatgtttgcttgaagcgtttttcaacttccgcatccatttcagccattgacgctaataattgtgacttggcatccaataaatcggcatcttgttgcattaagaaatcgtaacgttccttaacccgttggtaatcctcaatggcggccaaattgacagtccctaaatcagctaagcctaatttcaagagtttgagttttgatttcaattggtcattcgttaaatcagaagcttgtaaagccgatttagccgcttcataactcaactgataatcttcgcgcaatgtcgttaagcgttggtcaatattaatcttaacacggtttaaagcaaccgcgttttgttcttgctcagctaaagaattccgttgcaattggtaaacacgcgttgcgttagcttgtaacgtttgttgcgtggccttaagcgtttctcgtgccgtccgttttgttgccaattcggctgtaagtttttggatcagtgctttagtggccttcagttgcgtccgccgttctttttgcgtcatcgcatcttcagaatcagcttgttgcaatgcggcgagcgcttgttggcttgtctcaagttgttgcgttaaatcgttagccaattgcgtggcatcggtgagcttttcttgtacatttttttgttcggactgcgcaactgccaacttcgtttccaaagcggtttgttgttggcgaatctgttcttggctttgatcaaaatgttgtagttgttcattggccgcatccaggtccgcttttaactgcgtgagttgtgcttcaatttcggtagctgctgcctgtaattcgccttggcgtttcaagtccgcatcgtaactttgttgttgttgttgaacttgataatcagtcgcttgttgttggcgttcgaattgcgtaagacgttcgtttaataacgtcaactcatttttttgtgtttggtaatgcgtcttagctgtttcaaaggcaccttgttgttgttcaagttgcgcctgttgctctgccaaatcttgatgtaaagcttgtaccttggtttgcttttgatccaaggccaattgcattttgctaatttgttgttccaaatcagttaatgtttgctttcgtgccaataagccaccattattttggcgattattatggcccccagtcattgaaccccctggacttaaaatatcacccgctaaagtgacaatccggtaccgatgccctgtcaaacggccaatcttaattgcttctgttaattcagtggcgataattaaattccccatcaaatgcatcatgaccgggctaacaacatcgtcaaactgaattaagtcactcgcaatcccgataaagccgggttctgtttgcaattggttcaccaaactgcttggtaaagtccgcggtttcacgacattatttggtaaaaaggtggcccgacctagtcgattacgtttcaaataatcgatcgcttgttgcgccgtcttttcatcagttgtaacaatttgttgcaattgtgcccctaatgctaattcaatcgcttgttgatagtcgttaggcactgtcattaattcagcaaccgcacccagtaaaccaggtaattgttgtttttgcttcaagaccgctttgacaccttgataaaagccggcgtaatcatcgtttaattcagctaaactagcttgtttggcttttgccttttgtaaaataccagaagcttggaaccaattattttgttccgtttgatattgcttttgtgtcgcactgatttgttgttgtaattgacttagttgcgtttctaaagccgcgtagtctgttgctaattgggcaacttgtgcttctttagccgctttgtcagcttgcatctgtgtcaattgcgcactcgtttcactgattgagctatcttggcgtgttaactgcgtcttcgtttgtagcaaggctttttctagatattgttgttcattgcgattggttgtttgggcttgcatttgatcgatgtagtcttggcggatctgttcaatcttcgcctttaattcggcctcactacctgatgcttgtcgtttcaaggttgctaactcatttttcaagtcagttagtgttgcgactttttctgtgtatgttgccttaagtgcgatttgttgctgcttagccgttgttgactgcgtttctaattgggcgattcgatcgaccaagttttggcgattagcgtcagtatagctagcccgttccttagaaacattttcttgaccctgtaaattttcagccaagcgactcttaaccaacaaggtttcattggccgtttcaatttcttgatctaacgttgcgacttcctgttggttatcggctaacgccgtattggtttcttgaatctcactttcaatctcgcctagtgccttagcgagtgtcttagcttgggcttgatattgggtttgatccgctgctaattgatcaatttcaacgaccaacaattgctgatgtaaggcgttaaattgcgctttttgttccaaataatcttgcgcgatactgctttgttctttaagcggttcaacttgcccctttaattcgtaaacaatatcggcgatccgacttaaattttcatcggtttgatctaattccgattgagcctttttcttttgttgcttatattttaaaacaccggcagcttcttcaatgatattgcgccgatcctcaggtttactgttaaaaatagcttcaacccgaccttgcgaaataattgaaaaagattctcgccctaagccagaatccataaataagttgacgatatcctttaatcgacaacttttttgatttaaataaaactcactatcgccgttgcgaaataggcgacgggttaacgtcacattatctagttcttgatttaaatagtggtcactattatcgaaattcaacgtgacttcggcgcggttcatctgaggccgtaaatcagtaccggcaaaaataatatcgggcatcttctcgccacgtaagctcttggccgattgttcgcccatcgcccaacgaattgcttctgtgatattactcttaccgctcccgttcggaccgacaatgccggttaagccgtctgaaaaattaatttctgtcttatcagcaaatgatttaaagcctgataagactaatgattttaactgcatgcactaaactccctacactaacttaataatcgcaattatgctttaagttgttctaacgcttttttagccgctgcttgttcggcagctttcttattgcgacccacaccagagcctaatacccgatcgccaactaacacatccacttcaaattgacggtcatgtgaagggccaacttccgctaacaattgatagtcgatttcgatttcgccatcttgttgtaagaattcttgtaagttcgttttgtaatctgtttgatccgagaattcaccggcttcaatcttgggaaaaatgacttgtgaaacaaaatcaacgacagcgccgcgaccttggtctaagaacaaagcgccattgaaggcttcaaataaatcttccaaaagtgtcgcccgggcgcgggccccatttttctcttcacctttccctaagcgaatgtaacggtcaaaatgagcttcttttgaaaagctactgaaactcttcgtgcagacaattgctgctcgtaaacgtgttaacttaccttctggccagtcaggatactttttgtagaggtattctgagaccgtaatttccataacggcatcgccaagaaattccaaccgttcattgtcccgcaagcctaactcgcgatgttcattaacgtaagacgaatgtgtgaacgcttcgtccaaaagtgctaaattattaaattcaataccataacgggcgcgaagctcgctgactagtgctgcatccaaaattaaataccccatttcaactgattaatctttcactattataccgtttatacggctaaaaaaacagcgccgaacgccggtattccgaattaaaggcgcataaaaaaaacgtctgttctgaaatatttattttaacacgcaaacaaatatttcaaaatagacgtttctcatttaattagcttgttgcacaaatgtcgctaaagctgattggtaagacgcaacttccgcttcagtcgcataaacatagtgttcaggcgcgacttctcgtaattggcgatcaccatcgtcactttcaattgaactatcgtaaggcatccggcgacgttggcgctcaatcttaggatcaggcaacggcacagccgataataagctttgcgtatacggatggagtgggcgatcgtaaatatcgtccgctgatgccaattccataatcttaccgttgtgcataacggcgatgcgatcactaatgtatttcaccatcgataaatcatgggcgataaagagatacgtgaggttttgttgttcctgaatctctttcatcaagttgacaacttgcgcctgaatcgacacatccaaagctgagattggttcatcagcaatgataaatttgggtttgacggctaaagcgcgggcaattccaatccgttgccgttgcccgccagagaattcatgcggataacgcgttgcgtgatccttattgagtccgactaaatcgagcaattcattgacgcgcgcatcactttcggcttcatttttgaccaaatgatgaatgtgcaatccttcagcaatgatatctttgaccttcatccgcggattaagcgatgcgtatggatcttggaaaatcatttgaatttctttgcggaattctttcatctggcgactgtgttccttgattttactgatatcttgcccatcaaaattaatttcaccactagttgggctgtaaagccggataatactgcgaccagtcgtacttttacccgaaccagactcgccaactaacccgaatgtttcaccttcgtaaatctcgaaggaaatatcatcgatggccttcacttcggattttttgcccgggttaaagtattgttttaaatgtttgacttcaactaagactttacgttgctgtttatccatctgacaggcctactttcttatttataatttaaagaacgttatgttttttcatcaaagcttggattgctgcgggcggttcaaccgctggtgcatctggatgcaataaccaggttgccgcaaaatgcgttttggaaacttcaaagaatggtggttcttcttccacatcgatttgcagtgcgtacggattccgaggtgcaaaagcatcccctttaggtggatccaacaaatctggtggcgtcccaggaatcgcctctaacttacccgccgtttcgagtgtaggcatcgaatttaataagccccaagtatacggatgtttgggttcataaaagacttcgtccaccaaaccgtattcgataatcttgccggcatacatcaccgctactcgatccgcaatcccggccacaacgcctaaatcatgggtgataaagatgattgacgtttcaattttacgttgtagttctttcatcaagtcgataatttgcgcttgcactgttacatccaaggcagttgttggttcatccgcaatcaagatttgcggataatcaacaatcgcaatcgcaatcacaatccgttgccgctgcccaccagaaaattggtgcggataatctttcatccgttctttggcgttcggaatgccgactaattctaacacggtttgggcccgcttcatcgcatcttctttgttcatcgttttgtgaaccaataagggttccgccacttgcttgccgattgtcatggttggatcaagcgaggtcatcggatcttggaagatcatcgagatgtcgctcccgcgaatcgcatccatttcacgttctggttttttcaataaatcatcgccatgatagatgacggtcccggctttaacgtgggcgttactggccagcaaccccataacgctacgcacggttaccgatttacctgatccagattcgccaacaatggctagcgtttccccttttttaaggttaaaactaacatcccgaattgcgtggacgtcacctgcataggtcttaaaatcaatacttaaatgattaacttctaaaatatttgccatttgacgacctccaactatgagaccgcgaacggtcttttttcgtaatttgaaacgtgcttattgaaactgacttctgcgcttaacgacctattgcaaacaatcggctataccgattattcacaacactaagttaatgctcaaagtcaaaccgttccaaacgcactctttttgaaacgtgctttcattaacagctttctgcgctttgctatgaattgtaaacaaccgactatgtcgctcattcacaactctatgcaaatgctcaaaagctatcgttaatgacacactctttttgaaacgtgctttcaaaagcatattcctgcggttagcgacacaaggcaaacgattgcttgcagcaatcattcgccttgctatgctaatcctcgaaatataatcgcttttgacgcaacttatgattttggatcaaatgcgtctcttaggccgtctgctagtaagttgacggcaatcatgatgacacataagactgctgctgggtaccacatttgatagggtaagaatcgaaaggctttttgcccgtcagataataaagtccctagcgatgcgttaggtgcgggaatcccaatcccgataaaactcaagaatgcttcgaagaagatcgcactcggaatggtaaacatcgtttgaataataatcgttgatgataagttaggaattaaatgtttcatcgcgatcttgaacggtgtctcgcctaacgttctagccgcgagcacaaattcttgttccttcagttggaaggtctgcgcccgaatcagtcgggccatcgtaatccagccggtaaagccgatcgcaatgacgattgataaaagccctggtcgtaaaattaacatcatcagcaccacaacaattaagttgggaattgaagagataatttcaataaaccgttgcatgaacgtatcaatccgaccgccccgccaaccggagataatcccgtatggaatcccaatcaacaaatcaacgagcgttgctaggaccccaattaatagtgataaacgggtcccataaagaattcgtgagaataaatcccggccgaggtaatcagtgcctaaaatgaaatacttgcctttagggacaccagcttgttgatatttatcaactttaacgccggagacgtccgtctcacccttaaagcctggtagttgaccgtcaccaattttaggtgggaggttggcatacgccacattttgcgtattgggattgtgcggtgcaatcacgggcgccaatgcggctgcgatgatgatgatcaacagtacgaatagtgagaccaccgccaccttattttgcttcaaacgccgaattgcgtcttgcataaacgttaatgagggtgcactaattttttcttgttcttcatgtgtatctttattaagtggtttaaaagatcctgctgttagcttcgcatctgccatttaacgtgccccctgaccgtcgcttaatcgaatacgaggatcgataatcccgtatagaatatcaacgactaaaataataacggttaataagaatgagtagaaaatcgtcaagcccatgatggttggataatcattggtcatgattgatttaacaaattgttccccaataccaggaattgagaagatattttcaacaaccaatgaaccagtcattaagttgaccgccattggaccgatgattgtcacaaccggaatcatcgaattacgaagcgcatgtttggcaactgtttgccatttagagttccctttggccttagccaattcgatgtaatcactactcaagacatcgaccatttcagttcgcataaagcgggctgtattggccaatggcgctactgctaacgctaacgatggtaggatactagatgaccaaccatcccataaggcgattgggaacatttgtaatttgaaggctaagaagaattggagtaaaacggctaagacgaagttgggaatcgaaattcctaggattgaaaagaacgtcgccacgccatccacccaagtattcttgcgaattgccgcgactgcccctaataagacccctaaaacggaccctaaaagcatggcttgggccccgatttgaagtgagggtcctaaacgcgtcatgatgaggttggcaaccggttgattattaaattggaaagacgtcccaaaatcaccgtgcaacaaaccacctagataaataatatattgttggaacagcggcttattcaaaccgtattgttcgttcataattcttaattgatcagcgctcatcttttgttgattcgtatatggcgtcccaggcatcagtttcatcatgaagaacgtcacagaagcgacaatgaatagcgttaatactaggtaaaaaatccgtttaatcaaatatttactcataagttcgctcctaacaaaaacgggcttcattgtttttcaacgccgaaacccatcttttataaagtcagtttatttttttaaataaagtgagacattattgtaacttccagaaggaccgtaatctaatcccttaacacttgggttagtgaggtaggcacgtcctgattgatacaatggaatgacaccagattctttattcataatatcttgggctttgatgagattttgccatcttgctttatcgttattggcattttctgttttacttgctttgatttgagcatcgaattcaggattattccacttacctttattgttgtcaccaccagtcacgaataagtctaagaatgtaattgggtctgggaaatcagcattccaagcactgacaaccatgtcgaaatcaccgttatccgaacgtgttaaacgtgtcttaaatggcacgttggcaagggttaccttcaaaccaggtaagttcttttcaagcgtatcttgaagatattctgcttgtttcttagcagtatccgtatcatcacctaataatgtgtagttaaacgtcttacccgtttgaccggtttcagctagcccttccttccaaagcttcgttgcttctttaggattataggttgtatttttcttgccctcggcatttaattcactcgtgaaatcttttttagtcgttgggtcaaaactcatgccttttggcgttaatgaagctactggtgcagaaccgtcacctaacacttggttaaccaactctttacggttaatcgtcattgagattgcctgtctgatcttggcattcttgaagattgggttcttagcttggttaacttgcatatagaatgtagcagcttgttgttgggttgaataatgagaatcattcttcatttgtttagcagtatcgccactgatatttgtgcgatcaagcttattactttggaataagttcaaagcagttgaaggatctttaaccacttggtatttcaaagttttcactttaacagctttagcattccagtagttagtatttttaacttctttccaagcactatctgggccgttccaaccagataacttgtaagggccgttgaagactaatgtcttagcatttgtcccataactcttaccggctttcttaacagcatctggataaactgggaagaatgttgaactggtcattaattgactgaagtatggaattggtttttctaaagtaacttgtaatgtgtgtttatctttggcaactacccctaatgaactaacgggttgtttacctgaagtgatggctgctgcattttcaataccttcataaatgtaagcatattgtgagccaacttttggatcaacaactcggcgccatgcatagacgaaatcttccgctgtcacagccttgccattactccattttgcatctttacgtaatgggaaagtatatgttaagccattattagttggtttaaccactttcgtcgcaatcgccggtttaatggtcttaccttcataacggtaaagaccttccatcgtgtccgttaacgcctgcgccccaatcacgtcggtgttcaatgcaggatccatcgttgaaatcacatcggttgttgaaaaactaaccgtatctgctgaacctgcattcttgctacttgaagaaccacacgctgccaataataatgttatcgccaccgtcgttacacctaatactaaacccttttctcgtctcatgtggacactcccttcagttgttaaaaataatcatacctgattgaaaatgaaaagtaaataataaagattaaaatattctaatttaatttagttgaattaccaacgctcgtgattaaaaaattagaatctctcataaataataacgattattatgtgaaaacactcattttaaaccgtctattcttaaccctgaaaggattgacaagtttaatcatagcgctattttgtaacttcgaaaagttttctgtcttgtttggggacaaaaaaataggaagggtagccaaaagtgacttttagctacccttcctatactaaacgtgggctattagtcatatccttgtggttaacgtcgcatgtcaaacgattgctgcgcaatcattcaccactctttgttaatccgcaggatatacccaactgatagcacactctcaaaaaaaatagaccgtgaattatcacggtccaattgactactttatttggtcttcgctttaatgtatgcaacggcatctgccactgttgcgattttttcagcttcttcatctggaatctcggcaccaaacgtgtcttccaattctaagacgaactcaacaatatcaattgaatcagcatcaagatctgctttaaagttcaattcatttgtgacctggtcttgggtcaattcaaatcggtcagcaataattgctgcaatcttatcaaagatttcttgttcactcatgttaaaaacctccaaattgaaacactttcgcacctaattattttgggtatccagtgattatacataacttccacgtttctttcaagcaatcgattttatgcctgcgaaagtcattgtaacgcctttgaaagacattgtctagctatttaattagaattcttttgcgcagcttggtcactgaaataatcgatgactttttgaaccgtttgattagctaacatcacatgaatttgtttaaccgtatagtagactgtacgtgcatcggcagccccgtgcgccttgataacgggtgctttcaagccaagtaaaacagccccgccataaatggacgtatcaaatctttctctgatacccccgacactcccttttaataataggccaccaattttttctttgaccccagcatccataatcgcgtgtttcacttgagacatgacgattgtggcagtaccttcgattgcttttaacgttgcattgccagtaaagccatccgtcacaacaacatcagcaacaccttttaataaatcattagcttcaacgttcccgacaaaattcaaatctggatcatccactaaaagttggtacgttgccttatgcaattcgtcacccttagtcgcttctgtcccgttattcaacaatgcgattcgtggattttcgatgccccggacgtctttagcatagaaattacccattaaaccgtattgatgcaagtgttctggcttagcttcagcattggcaccaacgtctaacatattgaaaccttgatcagaattaatcgatggtaaagtgggcattaaacctggacgatcgattccttttacccggccgataataaataacccggctgctaataaggcccctgtgttccctaatgagaagagtgcatctgcttggccatctttaaccgcttgagcggctaaaaccattgaggcctgcttcttacgacgaatagcgcggactggttcgtcatcactcgcaattttttctgtggtatgcacgattgttaagcgcgtcatatcatcgattaagggttcaatctgtgcttgatcgccatatagaataaaatctaggtccgtaaattctgaacgggcttgtaaaaccccttcgattactgattgaggcgcgaaatcgccgcccattgcatcaactgctactttcatgctacttcctcttctttcattaatctaatgtttgatagttttgtttttgttgtgcgagatacgcttttaaaggcgcgtacgccggttggctaaaagtaggatcaaccgtgaagattttttgtacttcttgttgtgcgacctgtaagctgacaaaatcagcgactggatcaccaaccttgaagactggtaatcccgattgccgatcgccaaagacctcaccagggcctcgtaattccaaatctttttgcgcaacaacaaaaccgttggtcgtttcggtcatgatcgtcattcgatctacaccttgttgattcttaggatcggcaatcaatagacagtaggcctttttcttaccccgaccaacccggccacgcaattgatgaagttgggctaagccaaaccggtcagcatcaaaaatcatcatcacggtcgcattaggcacatcgaccccgacttcaacaacggtcgttgaaaccagtagttgaatctcgttatttgaaaaagccgtcataatccggtttttctcatcatccttcaacttaccatgtaatagtgccacatggtactgcggctcaaaccgctccgccaaagtcgcgtatatttcttccgcatttttgagatccatttgttccgactccgcaattaacggcgtaatcgcaaaaacttgcgagttgtcagctaattgtttttgaacaaacgagagcgcttgttcaacctggttactacgcacccaactggtttcaattggaatccgacctttaggtaactcatcgatggtcgaaacatccatttcgccataggcggtaatcgccaaagtccgcggaatcggtgtcgctgtcattgccagcatatcaggctgcaagcctttttcacgtagcatgcgccgttgattgaccccaaatcgatgttgttcatcaatgacggcaaagcctaacttatggtaaaccacggcatcttgaataagtgcgtgcgtgccgacaatgatattgatccgaccggattcaatatccgccaacaacgtccggcgctccttggcggttgtcgaaccagttagtaacccaaccgtcacattcattggtgcataaagcttttgtaggctctgataatgttgttccgccaaaatttcggtgggcaccattaaggccgcttggaaaccggccgtcaccgcagcaaacatcgcaatcgccgcgacaatcgtcttcccagacccaacatccccttgtaaaaggcgattcatatgtgccggtgccttaaggtctaaacaaatttcgttgaccacccgcttttgagcatccgttaaatcaaacggtaatgtcttaataaattccttgagggctgcgttttgataaggcagtgctaagccattttcaacatggcggtctgcttgtttaatcgcctgcaactgcagttgatacaagaaaaactcgtggaaaatagcagtccgtcgagcctgctttgcttctggatagctttccggaaaatgcattccggcaatcagttccacttcagaaactaatttataccgctcacgaatatcagctggaatcaaatccggaatgacactttgataattatcaaatgcttcgcgaatcaatttcacgagcgtgccttgacgcacgtttttattggttgaataaatcgccgcgaacgaaggattatcagccgattgaaccgctaaaaccttcatcccggttaaactattccgtctagcatcccatttaccataaacagcaatatcaacaccggcttcaaatttatccttcaagtaaggttggttgaaaaaagtcaccataatgacatcatgattaatcaataaccggacgtttagccgtgtcttacccggtccccaacgactgacgactggatcagcaacaacggttccttttaaggtaaccttttcctgatcgaccgcttctgagagatccttaacctttaaatcctcgtaacgaaacggaaaataatacaatagatcactgattgttgcgattcctaattgattgagggctgtcaaacgcttcgggccaacacccgttaaaacagtcacagaatccgttaaacttaacactgacagcacctccgttttttgatgacttaaacgtgcttttcaaaccatccttctgtggctagctatgtcccgcaaacgaatgacttcatcactcattcactggactaggctagtcctcgaatgataaccggtttgaacgcacttcttttttaacgtgctttttgaaactgactcttgcgcttaacaacatttgtcaaatcagcgattgcatcaccaattcgccaaattaagttaatcctcagagtcaaaacgtttcaaacacacttctactaaaaaacaggaatcaggtatttttaatagccccattcctgttttatttgattaattattcaactgaaattaaatatggataaacaggttggtcaccttcgtgaatttcaacttccaattcatcgtcttgggccatgattgcatcactaattgcttcagcttctgtcatatcaccgtcttcaccaacgataattgtgacgatttcactgtcttcatccaacatggtttgaaccatttcgatggcagctgtttggcgatcagcagttgagaccttaatcttaccgtcgataatccccatgtaatcgtcttttttaatttcaagaccatcaagcgttgtatcgcgaatggcttgtgtcacttgaccactaattaccgtatcaagtgcttcagtcattgctacttggttagcttgcaattctgcagaagggtcaaatgacaagagagctgtcatcccttgtgcgattgtccgactttgaacaatttcaaccggaatttcagcaacttcggcagcttgttccgccgctaagaagatgtttttattatttggtaataaaataactttcttcgcgttagctgcttgaatggcatccaaaatatcttgcgtacttggattcattgtttgaccaccacttaaaatataagtggcccctaaacttctgaagagttctgccacaccagcaccagctgaaatcgcaataatcccagtatcaactggttccgcttgaacgggtgctgcttgttgatcattttcaacaattgtatcatgttgcaagcgcatgttgtccactttgatcttcatcaatgaaccaaaatgttggccataagccatcactgttcctggatgttctgtatgcacatggactttaaccacttcatcatcggcaacgactaataatgaatcgccaataccatttaaatgatttctgaattcatcgtagtcaaactcgcgatcaacagtagtaccatcgccaagtgcaaccatgatttctgtacagtaaccattttcgatttcttcagtccccatttgtgctgtttggtgatggttagcgttaaccatttcatccatttcagcttcatcgggtgtataaagatccttggcaggtgcttgacctgttaaaccttctaagaaaccttcatatatgaaaactaagccttggccaccagaatcgacgacgccgacttcttttaagacgggtaataattcaggcgtcttcaataaagccttcttagaaccttcaacgaccgcttcaacaactgcaccaatatcatctgtttgtgcagcgactttggcaccagctttagcaccttcacgcgcaactgttaaaatagtcccttcaacgggtttcataactgctttgtacgctgtttgaacgccacttgtaaaagcatctgctaaatcttgggccgttaaacttgttttttcttccatactctttgaaaagccacggaaaatttgtgaactaatcacaccagagttaccgcgggcacccattaatagacccttagctaaactctttgataattcaccaactgcttgcgcattattttcattaaccgccttagcaccactttgaaaagttaaactcatattagttcctgtatccccatcaggtaccgggaaaacgtttaatgaattcacaaattctgcatttttagttaagcgatgtgcagcaacacgcatcattgcttgaaactcggttgctgtaatttcagtaactttcacgaatgttcctcctcgaacgaaaacaaatagaactggctttaaccaccagctccgctcattattttagtcttctaatacacgtataccttgaacataaacattaactgagtttgcactaacacccaacattgtttcaagattatatttcactttactttgaacattacggcaaacttctgagatcttaatgccataaccacaaataatataaacgtcgattgccacgccattttcttcttgacgaacaacaacgccccgattgtaattttcacgatttaaaatttcatttaaattgtcacgaatttgattcttgcttgccataccaacgatgccataaatatcagttgcagcaccgccaacgacagtggcaatcacattattcgtaatatcgatatcgccgtattgggtcttaattttaacagccattaaaatagcctccttgtgacatacttaatgttattttagcatagctccgataactttcaaagtactttaacgaacctgtattgcttagtataacgcatgcttttattagatactacccttaaaaaatgacctgtcaagtaattttccttgtaagagttcttgcattagctcaactattatggtaaattgtttaagtgaattgtgtaagccggtgtgcatgcatgcaactattaagactaactgaatcatattatgtttctcgttaattcttctaccggctttactaaaaggaggaatagaccatggcaaaagacgttattaccggccgtaaaacatcatttggcaacaagcgttcacacgctttgaacgcatctcgtcgttcttggaagccaaatttacaaaaagtacgtatcttagttgatggcaaacctaaacgtgtttgggtttctgctcgtgctttgaaatcaggcaaagttactcgtgtttaatttcgtttcttagattgtcttcggacaatctatttttttgcgcaaaaatagagtgcgttgccagtggttagcttttgagcatttgcataacttggcgaattggcgatgaaatcgccggtttgacaagtgtagcaaagcgcagaaagttactggcaaaagcacgtttccatcaaaaaaggctcgacaaaataaatttgtcgagcctttttatattcgaattttaatggcttaaacgtgctttttgaaactgacttctgtgcttagcgtcactcgtcaaataactgcttgcagcagttattcgccgagctgtgctaatgctcaaagtcaaaccgtttcaaacgcactcttttaatccttactttgaatcaccgctacgatgcccgttttaaaattaaaatgcgctttttcgccgatgaattcgttgctagcccacgaaattgggaccgtcgtatcaaaatgtgtgagtggatatttctcatctactaaatttaaatccgtcgttggcacgagcgggataaacgcgaggtactttttatcagcctcttttgtcagctcatacgtccctggcgcatagaattgaatcgtattttgccggtcacgcatctcaatgcgattgaggaccgttctaaagcgttcttcgaccgccataaagagattggctaagaaatggtcaattcggcctccagtcgcaccgtagaccaccacacggtcagcctgtagttcttcaaaggcaatcgataacgctaattgcgtatctgtttcgtctttttcagcttgaaccgaacgaatatcactgaccgccgctagtacctgttctttttcagccggggtaatggaatcaaaatcaccgaccgcaatcgtaggtgtcacgccttgttgcaataggcgtaacgtcccacgatcggccgtaatccattgtcctgggaccgttgtgattgttgctaattccgatgcccactgatcaactggaccacctgccaataaattaacgcgcttcattagcagccttcttaagggtttcaattcgtgttgctaaatcaccagcaaatgtgtatgaacccgctacaaagacatcagcgcccgctttggcacaggccgcgattgtttggtcgttaacaccaccgtcaacttcgattgtaaaatcagcatcagcgtgtgcttcacgataagccgctaattcagcgaccttcgttaacattgctggaatgaatttttgaccaccaaaaccaggattaaccgtcattactaaaacttgatcaaccaatggtaaaacagattcaatgtagctcactggagtccctggattgatgaccaccccagctttaacaccagcatctttgatcatttgaagaccacgataaagatgttctgttgcttctgcgtgaatcatgattaaatcagaaccagctgttatgaattgttcaatgtagcgttctggttgttcaaccatcaaatgaacatctaagcctagttgtgttagcggacgaataccgctgaccacttgggcgccaaaagacatgttaggtacaaacatgccatccataatatcaatatgcaataggtcggcacctgctgcctcaaggttttgaacatcccgttgtaaattcataaaatctgcgcttaaaatcgaaggtgcgatttgtgtcattttaaaaactcccatccaatttcttattttgatttcttataaacaggccggatatcctttaattcggcccggaattgcaaatagttcgtatagcgactttgcataatttcaccagcatcaacggccgctttaaccgcacatttaggttccatcacatgttggcaagttctaaacttacaatcttgtccaatttctctaaattcaggataacgactcactaaagtttcactcgtcacatttaaaatgcccagtgatgaaaatcctggtgtatcgccaaccaatccatcgttcaatggaattagttcgatatggcgcgtcgtatgcttcccacggtttaaactttgtgaaatttcagccgttgctaagttcaatttaggatcaatgtgattaagcagtgttgatttaccagcccctgtttgtcccgtaaagacggtcgttttatcagggaatgtgtcttcaatcgcttgaataatctctggtgtaaatgccgttctgggtgcaaaagttggataacccactttttcatagtaatccaaatattgcttaatctcttgatatttttcgtcagaaatcatatcggttttcgtcaaataaacgaggccttgaatattcaaactttctaaataaatcaagaaacgatctaataagtttaacgaaaaatcaggttcgactgccgaaacaatgacaactgcctgatcgatattcgctactggtggtcgaatcatttcatttttgcggtctaaaatttctaagatatagccgctttctgtttgactttcactttcaaattcaacgaaatcgccgaccaatggcgtaattttccgttttctaaaattacctcgagcccgtgttcgataaattttgtgctcactttgtacatcataaaacccactgagggcacgaataatctgtccggtctgcaataggtcacctcccattattttttaacctgttctgtggttatctactaaaattgcttaatcctcccgtaaaatacggtagtaacttattttatctaaagattactttgattgaacgctcgattgactactttgactagctgaactactgatcgattcacttgctgattcgctttccgattcactctctgattcgctctctgactcactcgcgctactttcactcgattgacttgattcaggcgcactcgactcgataactgaatttgaactcgacgtcacaatagaatgatgttcagttggttgctcgccttttgaaaggataacgcttacgctatcaccttcttgaaccattgtaccacttgcaggcgattgactgattaccattccttcagaaatacttgatgaatattcttcagagaatacgaccgttaaaccattttgtgcagcatagtcttgaatcccttgctttgtatagttgcttagattatgcaatgcaaaaccaggtttgccgctgctgactgttaaggtaatcgtcgttttacttggaacgacccttttgccagccgcaatactttgatcgataatcaacccaggactcacttcagatgaactttggtatttccgtttaactttcaagcctttatccttcaaagcatcccgaacatcactatatgcttggttcgtatagtctttaatcttatacttttggcgtcctgaactgacaattaaattaaccgtactttttgattttacactcaggcccgctttaggtgttgttcgaatgacgtggcccttactgtatttctgactcgttgttttttgaaccgtgccgactttcagttttttatcggtcaaagcagattccgcattttgttgtgtcatatccgttaaatcagggacggttacttcgctcccctgaactgcaaaagcaatcaccgttgctaataacagcaataaaacaacaccgccacctagtagccaccacttacgcttagacttagctggctttttaacctttttctgagttgattctgcttctttaacttgttcctcatcgttgttggtttgcgtaatgccttctggatctagtgcaggaatcaccttagtctcactcaaatcatccgcttttgatggcacaaatttaggttcgtgcgcacgactagctgataaagaagttgctaagtcagccatcatggcatcaacaccactatagcgttcatccggatccttggcagtcgcttttaaaacgacattttccagggcttgcggaatacgtggatcatagttgcgtactggtgggacttcatcttggaaatgcttaatcgcaattgaaacagcggactcgccttcaaaaggcaccatccccgtcaataactcataaagcacaattcctaacgagtaaatatcagaccgtttcgtcgccatcgagcctcttgcctgttccggtgagagataatgcacagaccccaacaacgtgttggtctgagtcatcgctgtttcgctgagcgcaatcgcaatcccaaagtcactaatcttaatattgccgtcttcatcaaccaaaatattttgtggttttaaatcccgatgaataatattatgcgcatgtgcgttttgaaccgcagataaaatctgcgtcataatatcaattacacgttgataaggaattggaaagtgttccacgatatatttcttaagatcggtgcccttaatatattccataatgatgtactgcatactgttttcttcaccaacatcgtaaatactaacaatattcggatgatttaattcagtcgttgccaacgcttctcgcgtaaaccgtcggactgtactcggatcatttcggagatctaatcgtaaaactttaactgccacttgccggtctaaaattagatcctgcgccaaataaacattagccatgccgccttcaccaatgggccgaataatcttataacgccccgctacagcgtaccctgtttccatcatggcgtaggcacctcaccttcgtgatgtaagatgagtgccgtaatgttatccatgccgccagcttcgttcgctttttggattaaggcggcacatttttcttccagcgtcatctctgccatcaaggtttgttgcaattgatcgtcatcgaccatattggtcaacccatctgtacataaaagtaagtagtcatctggttcgaattcataaatcgtcacatctgcatcaacctcttgagaaacacccagtgtgcgcgtgatgatattcttttgaggatgatgcttagcggcttctgccgttaattccccttgcttaaccagttcattgaccaatgagtggtcttccgttaattgacgtaacgtattgcgtctgagacggtaaacgcggctatcgccgatattagcgactaaatagtgcgtcccggaaattaagactgccactaaggtcgtgcccatccccgataaatcgtcatattgattcgctttggctaaaatatgttggttttctctttgtaattcaaaaatcaaccacttaaccatcgcttcaatatcagtatcatctgttttttcaaattcatgtccgatatgggaaacagccatttcagaggccacgtcgcctcctaaatgaccgcccattccatcggcaacaattgcaaattgaacaccgcgttgattagtataaaaaccaacataatcttgattattctgtcgctgttgaccgacatctgtttgatatgcaacttccataaaaaatcacctcaattgtagttatgcccgtcgtttcaaacaagcgatgaaaaagccgtctgtttggtaatcatctggatagatttggacaaaaggacttgcttgattctgcgctaatggtaattcaagtggcactggttcaatttcaaactccggatggttagcaacgaaggccgccaccacttgttgattttcttccggaacaatcgtgcatgtactataagttaggcgtccgccgactttcaaagtaggcgccacggcatctagaattgctaattggattcgttgtagattcatcaagtccgctggttggcggctatatttaatttctggtttccggcgcattagtcctaaacctgaacaaggtgcatcgactagaattttatcgaaatgtgcctcaccaaactgttcgcccaccttacgtgcgtctagtgcttgagcgctaacaacatcttcaacatggagccgcttcgcattttgttcaatcaagcggactttatggtcatgaatgtctaaggccgtgatttgaccgcctcgttgcgcatccaaataagttgccatatgcgttgtcttgccaccaggtgcggcacaagcgtctaatacttggtcccctggttgaatgtctaaactaggtgcgactaacattgaactttcatcttgaatcgtataatcgcccgcttcaaataacgcaccactggccaaatgaccgccttgtgcgaccaaaccaaccttagcaatctgactcggttggaggtcattaaactgcggttgtaactcagccaatatggcatcaaccgtattgacccgcgtattaactcgcaatgaagcgttggctggttggttaattgttgcgagcaatgattcgagtttatcatcccctaaatcagcttgcagttttgccaccaaccattgcggcacgctgtattgcacgctaagacgttcaattggatcagcaatcgcattgagatccggtaaaccactgcgttgtaactgccgcaaaatcgccgtcacgagcttagcaacccccgcatgccccatttttttagcaatttcagttgcttcgtagaaaatagcatgttctggcacgcgatccaaataaacttgttgataaaccgcggttctgagaacttggcgaacccagttgtccattttcttcggcttttgaatgaaaggtgctagataataatccaacgtgtattcatgctgaataacaccgtaaacaagctgcgttaaaaaaccagcatcttgtgggtttaatcgattcttattgattacttgatctaatgccaagtttgaataactattttgtttggcaattgccgtcaatatttcaacagctaagtagcgcggtgtcttattcggcatcttgcaccaccacttgttgaccgactgctagttgcttgccaaccccatttaaataagattgcactggcatcttggctttaccggccggttgaatttcagtgatttttaaaacagtcccgttaccggcagctaattcgaaatcttttttatttagcgcgacaactacgccggcggcttgatcagttgttgtttctgcaactgtcgcttgccaaatcttagtccgttggccattaacggctaaccaagcccctggttgaggccgtaaagcgcgaatttggttaagcaactgttcagcaggttggttgatgtctaattgttcttgttccttggtaatgttatacgcaaaggtcacttgcacttcatcttgcggtgtccgaggggctgtttgtgcaataatcccaggtaaagtctttaataaaagatcccgaccaacatagcttaacttatcgaataaactaccggtatcgtctgtggcttcaattggaatactagcttgttcgatcatatcaccggcatccattttcttagccatgtgcatgatggtaatcccgatttctgagtcgccatttaaaacggcgtattgaattggggcgccaccacggtatttaggcaataatgagccatgaacattaatcgcagcgattttagcggcttctaataattttgttggtaagaattgaccgtaagctgccgttacaattaaatccggttgtaaggcaatcacgtcagccagttcagggctgccactgagtttttctggttggaatactggtagatctagtcgaaccgctgcttctttaacaggtgtttgttgcaacacttgtttacgaccgactttccgatccggttgtgtcacaactgccaagatttggtagtcgtttgccacaagggcttctaaaattggtactgaaaattggggtgttcccataaatacgatggatgtcattaatcaatcacgctcacttttaagtaaattgtagaggttcattatccagcccaatcttaaacccgtgacgagtatcgatttgggtggtctctagtatttcggctaatttagcctgaagttgtggttcctgtttatatttaatcacaatttggtaaaaataacgattattaatccgagcaattgatttcggggtgggcccgagaatcagtgcttggtcggataaaatcggtcgcatctgtttggcaatttgaaaactcttctttgcggcaagtgcttcttcagggtggctaaccgtcaccttcaccgtaaagtaataaggcggatagccgccacggtggcgcaccgccatttcatattgataaaagccttcataatcgtgctgcttggcaaattgaatcgcgtaattctcgggattataagattgaacaatcacttgccccaccttatctgcacgacccgcacgaccactaacctgcgttaataattggaaagtccgctcactcgcccgaaaatccggtaaacccaaagcagtatcagcgttgatcaccccgactaacgttacatctgggaaatctaggcccttggcaatcatctgcgtccctaataagatatcagcttcgtgatcaccaaattttttcaataatttagcatgcgcgccttttttccgagtcgtatcaacgtccatccgcaagatccgtgcttcagggattaattcttgtaattcagcttcgactttttgcgtgccagtcccaaaatagcgaatttgacgactctgacagctggggcaaatcttaggaatggcttcttcgtgcccacaataatggcatttcatcgaatgcgtatccatgtgtaacgtcaacgaaatatcacagttgggacactgcaagacaaacccgcaatcccgacacatgataaatgatgaaaagccgcgacgatttaggagtaacacactttgttcgctcttttgcagccgttctttgatgccggctaataacgccggtgaaaagttgctggctttttgaaccttcatcgcttcgcgcatatcaactagttcaacagctggtaaggcttgttggttcacccgttgcgtcaggcgaatcagatggtagacatctttttgcgcccgcgcgcgggattctaacgatggcgtggcgctgcctaaaatgaccgggcagtgatgatactgactccgccaaatcgtaacgtcgcgtgcatgataacgcggactttcgtcttgtttataactggcttcgtgttcttcatccataataatcacgccgatatcttcaagtggcgcaaaaacggctgagcgggcaccgacgaccacgcgcgcttctttgcgttcaatgcgccgccattcgtcgtatttctcaccttcagacaagccactatgtaacacagcgactaaatcaccaaagcggccctttacgcgttgtaccatctgcggcgtcaaagcaatttcagggactaacatcagtgcggtcttgccttgttgcaagaccgcatcaattgtttgtaaataaacttcggtcttcccactgccggtgacaccttcaattaagaatacttctgaggcatccgttgatgcggattgaacgaccgcatcaactgcggttttttgttcgctcgttagcgtcattttgtgggttggttgaacagcattagcgtacggattccggtaagcttccaccttaacttggcgtagccagcctttttccgcaccgattcgaatattttcccgcgtaaaagttgttttttctaaaatcgtttttaataaagttggtgcctcttgatcaatcatcgtttgcagataactgattaattggctttgcttctgggctgactttcgtaaacccatccgtgcttcttccaattgttcaaaactcagtgccggctcaatcgccgttaattgcttaacttgtgcccggttgtcaacgtgataagtgacgctaattttaccttggcgttgcaattgcatgagttgtttcaacttatcaggcgccagattctgatcaaaagtcaactcatcattgccattgaacagactggcctgtaagtccgttggaatttcatcagttaacgtcgcagttttcgtatatttagcccgcatcacactgggtaacatcgtctgcagacacgtgatctgaaaagcatacgtctgttgtgctaaccaatccgaaagtgatagtaattcagggttaaccgctggcgttaaatcaacaactgcctcgattacctttaattggcccgtaaagcttggctggtctaaaacttgcaagacaaagccctgaatcttacgatcgccatttccaaacggaataataacccgcatcccaggttgaatgacatcaactaaagtgaccggtacctgataatcatatggccgattagtttgcattgtcggcacatcaacgattactttagcaatctgtggcatgctattcctcctttgagctaagcgctgtactgatccgttctaaaatttgtgtggcaatcacttttttggaagccaatggtaatgcttctggtgcctgatttggtcgtaaaagagtgaccgcattttggtcagcgccaaagccccggtcggtttggctgacatcattggccactaataaatcgacctgtttagccgttaatttgacttgcgcatgcgccatcaaatcattggtttcagctgcaaagcccactagatattgctttttcttttcttgacccaacgtcgctaaaatatccggcgtccgattgagttcaagcgtcatatcagtttgaccaacttgttttttaattttttgtgaaacgtattgcgccggtttaaaatcagcgacagcggctgccataatcacgacatccgcttcattatatagactagcaacggccccttgcagttcggctgccgttcggacatagatgacttgtgccagattagcagggacagccagttctggccgcgtactaatcaaagtaaccttcgcacccatttgagccgccattccagcaatcgcataccccattttaccagatgaccggttgccaatatagcgaaccggatccaaaggttcctgcgtcccaccggccgtcactaaaaccactttatcttgcaaacgattaggggttaattggcggtaaacattgctcataatcacatcttcttctggaaaacgcccttggccttcatagccttccgctaaaaaaccagtagcgggttgcacaatcgcaatcccatctgcttttaattgtgttaaattgcgttgtgttgcaggatttaaccacatatgttcattcatagcgggcaccaataatttaggcgccgtagttgccaaaagtgccgtggtcacgaaatcatctgcaatgccgttcgctaatttgccaacaatattggccgtcgcaggtgcaacaattgccaattcggtccagtcagctaagtgaatgtgggcgacttgttctgggtgattcatcgtcattaaatcagttagcacttcttgccgcgttaatgtcgcaaaggtcaatggtgtcacaaattcggtggcagcctgcgtcattgccacgcggacaattgccccatttttaatcaactgacgcactaaactagcgaccttgtacaccgcaatcccaccggttacgtaaaccgtaacgtgtttgttttctaaactcaccattttaaaaacctcctttaaataaaaaaaccgcctcttaatttagacatcccacgatgaataaactaaaaatgcggttcgctaattattcttattcgccatctttttgagaaagcttatccattttttcagcatctttttcaagcatcaatgaatcaggatcaatggttacattgccagcagcaatttcttccattgccatccctacggttttaggtgatttgtattctgataacattttcaaatcgccagcttcgatttgatgtgctcgcttgcttgctaaaacggctaatgaatagcgtgagttaacattttctagtaacttatcaattgaaggatatacaatcattttattattcccctatcattttcttatattgatcaatcacacgtggtactcgtaagtgttcactctcaataatcttttcaatccgttgaacggcatttggaatttcatcattgacaacagcgtaatcataattttccatcatccgaatttcatcggctgctttttgcatgcgcttatcaatcgttgcttgatcgtcagtgccacgtttttggattcgattgcgtaattccaataaatcaggcggtgttaaaaagataaacacgccatctggacacttctcacgaacctgcatcgcaccttggacttcgatttctaataagacatcgcggcctgattctaaggtttgattgacatacttcatcggtgtgccgtaataattatcaacatactgtgcatactctagcataccatcatttgcaatttcttgctcgaattcttctttgctcacaaaatagtagtcaacaccatcttgttcgcctggtcttggctttctagtcgtcatcgaaactgaatagtgaaaatcacgaaattcatcttctagcattgcttgacggacagttcctttaccaacccctgatgggccagataaaacgatcaacattcctcgattggacatctacgtaattccctcttcttttataaaataattaagttctattttatcactagatgactgccaattacaagtctactttaggttcatctcatttaatattgtttgcaattgtgcaacttcctcattggtgagcgtgatgcccttgcccattttcgcatgatcgggtgcccagtcccgtaaatcaaatttaggtgcgcgaccattccaagcaattaagttcaattctttcttccagcccgccttattttcactaatgaccccaatttcagccataatttcgtagttgatatcactcatcaaatcaccctttctcatcgtttaatctattatacacgaaaaaaatttaaatttgcgcttgcagattagaacgtttgttcgtataatagaaatacaaacaaacgttcggaggacaacacgttatggaaatcaaacaatcagcagtagtcggctttagtcatgaattggtgaaacggtatcaacgctttttcgaactcgatgatgaccaagaattaatcgaacaaccccagatgcaacctagccaaattcaactttatatgatgcaagcttttgatcgccattaccgtttggctatccaatttaacgtggccgagcacatcgaacaagtcaatgggcgcttgattaagcaactcgacgaacaaacttacttgttaaaagagaatcactctaatctttataaaatcgttactttaaatcaaatccgctacatctcaaaaaataactaacaatagacgatgaccgttaaagaaggggttaggacaacaagtcctaaccccttctttattaagcttgtctaatctgtgctttagcagtttctgcgaggtccactaattcttgggcgtgttctagcgttaattccgtcacttctgtccccgccaacatacgagccagttcagcaacgcgttttttaccggttaccttttggattgatgtttctgtgcggttttgcttaatttgtttttgaatttggtattgatgatcactcatcgccgctacttgtggcaagtgcgtaatacagaggacttgtgagtgttgggcaatttcgctaattttattggcgattgcctgtgcaacacgcccactgaccccggtatcaacttcatcaaaaataatgctggtaacgccttgtgattctgagaaaatcgttttaagcgccaacatcaatcgggataattccccaccagaagcagtcttggcaagcggccgtagcttctcacccggattaggttgaatataaaattcaactttatcccgaccgctgcgcataaattgctgattatcaaccatggcaaattcaactttgaaaaccgttttagccatgtagagcgctttgagttgttggtgaacagccttttccaactgttgagcagctgcttggcgtttctcagaaagaacggctgcttcttccagcaattgggcttgttgttgttcaaattgttgctctaattcgcttgcattggcttcggtggcctgcatcgcttgcaattctttggtaatttgcgccccataagctaagatttcaggaattgaatcgccatatttatgttcgagattattgattgtttccaagcgctgttcaatttcatccaagcgcgcttcgtcccattcaagattatcgacttcccgactaatatcactaccgctatcttgcagtgtgtaatagcctgtttgtagattatcggcaattcttttgaattcaggatctaattccgcaatttcttgcatttgattcattgcaatcgcgatttgatctagcgcgttgccttcttcaccagataaaatggcgcgactagcttgcaaggcctgattaattcgttggaagttgctgagtttcgcgcgttcttcgattaacttactttcttcatctggttgtaattgcgctgcgtcaatttcattagtttgaaatttaagcatatcaaggcgttgggcccattcctgctcattttgttgcttcttcttcaatgctttttccgtttgccggtaagcctgataggtttcttgataggccgcctttgcactcgccaaagctgtgtgggcaaactcatccaacaagcctagatggcgatcaggatacattaattcttgatgttcgttttgaccgtgaatatcaactaatgtttctccaatctttttaagcgtcgcagtgttgaccagatggccattaacacggcaaacattatgcccgtttaatgccaaatcacgttgtaataaaatggtttgatcatcgtgttcaatcccatattcagctaaaagcgcggcagtcgtggcgttttcgggtgatgtaaacaagccctctaacgtcgcttttttcgcaccggttcggataaaatcctgtgaccctcgaccaccagcgagcaggccaaccgcgtcgataataatcgatttcccggcccctgtttcaccagaaagaaccgtcatcccttcatcgaaactaatggccaattgatctataattgcaaagtcgtgaatgactaattcttgtagcatttgaaaatgcccctttcatctggtcctaatcttaaaaaaacttgctaaattactttagcaagtcttcgataaataatctgaactgttttgcttgttcctcagatttacaaataataaggaccgtgtcatcgccaccaattgtcccaaaaatatcttcggattgtaattgatctaataaacttgcaattgctggcgcattaccaggatgcgccttaatcaccacaaaataatcctgttgattatgggtcacataggcatctcgtaatgtccgtcgcaatttttctttaacatctaattttttttcaagcggtaagctatagtgatagccttcgtccgtattagggacttttaccagttgcatttctttgatatcacgcgaaatcgtggcctgcgtgacctcaatttgttccgcctgcaagagtttaacaaaatcttcttggcgttcaatttcatgagtttgaattaaatttctcaacagtcgttgtcggtctactttacgcatcaaaaacacctcttcttgtgaataacaattctaactcacatgatagcgtatttatacataaaacacaaagatttatgcattattttccagaaggtcgttttaattctgcataagctcgttctaaaaccgcatcaatattcacattttcagcaagtgtgcccgtctcggcttctgtatttctaagatggatcaagaactcgatgttcccttcgccacctttaattggtgagaaatcaagacctaaaacatcgtagcctgttgctaaactaaagttgacgatatctgtcacaacatttttatgaaccttaggatcacggacaatcccgtttttacctacattagctggacccgcttcaaattggggcttaattaaagccaccgcatcacaattaggtttgagaattggttttaaaggtaccaaaatcttatgcaacgaaataaaggaaacatcggtcattgcaaagtctggtaatccatcagtaaagtcctctggttggctataacggaagttaacccgttccataacaactacgcggggatcttcacgcaacttccaggccaattgattataacccacatcaagtgcataacaacgccgtgcgccattacgcaacgcaacatcggtgaatccacctgttgatgaaccgatatccagcgttaatttatctttaagatcgatatcaaaaacatcgatggccttcgccaatttcaaagcaccgcgacccacgtatgggattttgtgccctttaactcttaatacggtttcggcgtcgattttttcgccaggcttgtcaattcgttcatcatttttcccataaacttcaccagccataattgcccgcttgccttgttcccgtgattcaaataaaccttgttgtactaatagtacgtctacccgttcttttttcatctgttctcctattcgttgaaatagtccaaaaaactatttaataaagtccggtcaaaagtcgtgacttgcgccagttgttgttgtgcttgttggcaagtcgtgtgaagtgcttcttgcgcaccggacatccccaataaaatggggaaggtattcttttgttctgcggcatctttatgaacagctttgcccatttccgcagtggtactggtgacatctaagatatcatcttgaatctgaaaggccaaaccaaattgttgcgcaaaaccgcgtaaagcagttgtttcaacctcaccaagttgcgctaagacagcgcccatggccaccgcgacttcaattaaacaacctgttttaagatgatgaacctgttgtaattgggctaacgtcaacgttttgtgctcgccttcgatatcttcgatttgccccgcaaccatcccgttagcaccggccgcttgcgctaacaaccgaacaagttcgattcgttgttctgcggtcacgtttaatgtcgctaaccattcaaacgcaagtgttaataacccatcaccagccaaaatagcctcagcttcaccaaagaccttatggttcgtcggttggccgcgccgtaaatcatcgttgtccattgcaggtaaatcatcgtggattaacgagtaactatggattaattcaagcgcacccgctgctctaaaagctgtctcatcaatgctttgaccggtactttccaagactgcaaataacaaaagtggccgtaatcgtttaccacctgccatgaccgagtacgtcatcgatttttgtaaagttggttcttgaattttcgctaattcacgttttaaataagcgtcaaactgtggtaattcacgtgccgctaattgtttaaaatcagccattactgttgctcctcagcatctaatggcacttcttcgccgttatcggccattactttagccattgtcttttcagcttggctcaatgtttcttcaagtgtttgactgagtttgacaccttcttgaaaggccgtcattgctttttcaagcgggacatcgcccgtttccaactcgttaacaatcacttctaattgcgctaaattttcttcaaacgttaattttttttctgccattttattcttctcctttatgggttgcgacaacttcagctgttactaacccatcttgaacgtgtaattcaatcggttgttgggtcttaaaatctgccacttttttcaacatttgttgctgatcatccgtgacataggcgaacccgcggcctaaaatcttcaacggactgactaaatcgagtgctgcaatgacttgtgcggccttttgccggcgatcagccatcaagcggttcatcgcttggtttaaacgtcgttgttgttcagtaacgtctttttgtgcttgtcgcaccgccatcaatggtgattgtgccattaaccgttgttgcaacaattgaacctgttggcgccgatcctttaagagttgctgttgtgcagtcaataagcgccgttgtagttggtcaacattttggagatagccatcatacaaacgtttaggctgtttcaagacataactattttgtaaatgatcgagttgttttttattaagcgcaacggtttttgaaaaggcttgatataaccgtaaacgctgttgttgtaattttaaaatttcatccgttaaaacgggtgttgctaattcggctgccgcagttggtgtggcagctcgaacatccgcgaccaaatcagcaatcgtcgtatcggtttcatgacccactgatgagatgaccggaatctgactggccacaatcgcccgtgcaacacgttcttcattaaacggccatagatcttcaatcgagccaccaccccgaccgataataatcgtatcaaagtcgccgtgttcattaacctgtttaagtcgctcaactaaaacatcagccgcaccgtcaccttgaacaactgctgggaacaacactaactgtgcaattggatagcgtcgttgggtagtcgtaataatgtcgcgaatcactgccccggaaggactagtaatgaccgcaattcttttagggaaacggactaaaggttgcttaggggcatcgaataagccttcggttgctaacttcgcctttaattgttcgtaggcttgatacagggcacctaagccatcaggttccatgcgttcaacgtagatttgatagttaccagaggcttcgtatagcgaaatccggccgactatgaggactttcatcccttcttccggcgtaaacttcactttttcgaaggccgacttaaacataatggcactaattttagctttattatccttcaaactaaaatattgatgcgcattgggccgcaagcggaagttggaaatttcaccagtcaaataaacccgatccaaatacggatcgcgttcaaatttagctttcaaatattgcgttaaagcggtgactgttaaataatcagttggtttaaccacgtttgacacgttcctttgcaatttcaatcgtttgttccattaacatcgtaatcgtcattggtccgacacctcgtggcactggcgtcattgcgctgacgtgtgtttgaagggcttcgaaatcaacgtcgccagtgactgaaccgtcttcaaggcgattaatgccgacatcgataacaaccgcgccttctttgacagcatcaattccgaaaaagtgtggtttaccaatggctgctaccaaaatatcggccgttttagttaaggcttttagatttgctgtgcgactgtgggcaatcgttacggttgcgttagcattgagcatcaacgctgctaaaggtcggccgacaatattactccgaccgacaatcacaacatttttaccagccacatcaatcttgtgggccgctaataagcgcataatcccattaggggtgcaggccactaatccttgttggttgagccataattgcccaatattaacgggactaaaaccatcaacgtcttttttggcatcgattgcttggatgacatgatcttcattaatttgttttggcaatggcaattgcaccaaaataccatcaacggtgcgatcgtcattcagcgttttcaccaaggccaacaattcagcttcggtagtttcagctgatagacgcttcaattctgaagccattccaattttggttgctcttttttgcttactttgcgtataaatcgcactcgctggatcatcaccgaccatgatgaccactaatttaggcgttacaccttgttctttaagtgtttcaaccgctgtttgttgtgcgtgtgtcaattcatttgcaagtgctctaccgtctagtaattccaaaattcacagcccctatatatcgatatttgatgattccattttaacataagtagtcatttttttagcgttttgggttgataaatgatcattaaacctaaaaaaacacgctaaaaaaatacttttaacgtgttttaaggaatttcgttcgtattttactagttaaccaatttacttttattttgtcattttatgactaagcttcaacgaatttagataaaacgccgttgatgaagccttttgcttgatcatctgtaaattgttttgcaagttcaagtgcttcattcaaagcgactttagcaggtgcttcggttgagttttgcatttcaaacaaacctaatcgtaaaataataaggtctggttttgccaaccgagaaagttgccaaccttttttcaaataaggggttaatgctgcatcaagagcggcttgattttcagttacacctgatactaagaaagccaagtaagcaggcacttcaactggtgtcacttcttcagcatcaaattgatccatcgttaagacggcttgataagcatcctctaattctaaagattgattcgcattgagtgtaaacagcacttgaaaagctgcttgtcgaatttggtgtcgattaaaattaggcattaagattggtctccatttagatcaggtgtttcatcgttaaataaatcatctggatcaataatattttgtgttttttcggttacgacgccaacaacatgtacgttgacttccgctaattctaagtcagtcataaataacaactgttccttcaaggcttcttgcatggcaagggccaccttagggacagaaacgccataattaaggtagacataaacgtccgcattaactttgccatcaatcacttttaaagtgacacccttaccatgatttgaacgaccaaataattcattaatcgatgatgaaattgttccacgcatctgatgaacgccttcaatttggcttgcggcaatgcctaaaatgacttccaccacttcaggtgccatttggatcttccccaatgaattttcttgcgtatctagtacaatatttgtttcttcagccatcaataaccctcctaacaaattcttaccagcagttaaacgctgctgttaggcacgcgaaatgtaagtactatctgatgtattaattgttaattcatcgcctgcgttaatgaagaatggtacttgaaccactaagcctgtttctagtgttgctggttttgtaccacccgaagatgtatcgccacgcacaccaggttctgttgcagcaactgccaaatcaactgtcttaggtagttcaacccctaaggtttcgctcccaaacatcatgattgaaacttgcatgttttccttcaagaattttaattcatcttgaatttgtgctgctggtaattctaattgttcataagtatctgtatccatgaagacgtgattgtcaccatctgcataaagatattgcattgattttgtatcaatgattgctctttcaactttttcagttgaacggaatgttttttcttggttagcgccggttcttaaattcttaagttttgagcggacaaaagcgccacccttaccaggtttaacatgttggaattcaaccactcgccataggttgttgtcaaattcgattgttaagccgtttttaaaatcgttaactgataacattaatatttcctccgtacttttttaaaaggatgccattgccctaatcatagcaagaaatcaggtttaaaagcaagtctttccagtcgtttaaactgattgtatgtaaaaaagggattggccaaagccaatccctttagttatgctaaatcgcttcttgttagcgatccgcactcacagttagattgtcaatggtttgttgcttgagttacaagtataccagttatgaccgatttatacaaatcagcctgacaaatcttaagcaaataaaaaacactcacgaaatgtgagtgtttttaaagcattatttagcttctgctgtataaacagaaactttcttcttgtttttaccgaaacgttcgaaacgaacgacaccttcgacaagagcaaataatgtgtcatcgccaccgcgaccaacattttcacctggatgaatctttgtaccgcgttgacggtaaaggattgaaccagctgtaacagtttggccatcagcacgtttagaacctaaacgacgacctgcagagttacggccgttagttgttgaaccgccacccttatggtgagagaagaattgtaaattcatttgtaacatctaaatgcacctcctgtttattaactgtctatttacgttttgtttgtacttgaatgtactgcccgtattgttgcgtaatatcttcgagcgtcagttgcaaattctgcaagagaatctgcgccgttgccaaagcttgtcccgtaaccgttgccggcacttgacaggttaacaaaccaccatttaggttatctgcttctacctctggttcaaaaccagcgagcttttgcaaactgttaatcgtcccaattgagacggctgaaacagctgcacaaacgatatcactcccgtaaggacccgagtcagcatgacccgtaatttgaaaagaaataatttgcgaatccgcattgacgataaagtcagccttaatcatcttatttccctcaattaagcattgatagcgtcgatcatcactttagtatatggttgacgatgccccttcttttgatgactgtgtttcttaggtttgtatttgaaagtaacaactttcttttcgcgcccttgtttttcaacagtaccatcaacagtaacaccatcaatgtttggtgtaccaaccttagttgtttcaccaccaactaaaataacttgatcaaaagttactttttcgccagcttctgcggttaacttttcaacgtagattgcttgaccagcttctaccttatattgtttgccacctgttttgataattgcgtacatgtgtgcacctcctattttttcttagactcgccaactaaggtgactaataatagtacttaatgccttagtatgcgcggttgcagctgtggagctcacaattacaacgttcatatgatatcaaatatttgcgattgagtcaatagctatttacgcttcaacgaagaatccagccacattaaaagccatgtttggcatctgaacgagttgataaagcatcttagccatgtagcgtggtgaatagactaacccatcttcaatccacttgaatacgagcactaaactcgcgccagcaagataatctgctatgatactcaattcaatctgatcagactgggttgcctcttgaaataaattattgagataggcttcaattagccgccgcatttcggtcgttaattgctgtttaaaggccaaactcgtatcgtttttatgaaacaccttaaaggcatcttggcgccgctcaacatattcaaataatgctaatagattgatttgttgatagggttgcgctagtttatcattttgaatcgtaattgtttggtataaatcttgagttaaatcctgaactgctttttgaataaaatcagttttatcttcataatgcaggtaaaaagtgcctcgcgtaatctgcgcttgcttggtaattgcttgaattgaaatttctttagtggtcgctgtttttaatagttcaaccagtgctcggcgtaactgttgttttgtacgttgcacacgtggatcggtcgtttcaggattaatttcacgaaccattttggttcccccattctttggctacttcgcgtctagtatagcctgtttttttaataactgtctagcatttgcttttaaagtacgctttttttaatcggacccttttagattcaccaactcgcacctaaatttaattgtcgtcggctatttcttatagtagaatgaaacaagtatcttaaatcggacagtgttaggtggtcgttattttgatttctgcattctttactatttttctttcaatcgtattattcgctgtagttgctagccaattaacatttcgaatcggactagtacttaattgccttattttcatcatcttagtcggtatcgacgctagcctctttggttgggggagcggcgcccactggatttactttattttaagtttaatcggcttagtcgcaagcgaactattcttagcggacttaccgactgtcaaccggcattaattttaaacaacaaaaggcggactttcaggcaaatttacatttgtcctgaagtccgcctctttttgtgctgtttgtgcccctgccaaggacttttagtatatcattaatgaccactggattaaaccgttgttgcatccgccgttgattgactttcacttgtttgcggctgattttccgttgggccttcatcactattttgatcaggttgtatgttattggtttggctactttgcgatgtttcggtcgtcgttggcaatttttcttgcgtcactgccttagttcctaaaacttgccagccaacaaccactccgaccacaaacgtcacaaccaaactcataaacacgcccattttattcataatctacaccacgctttctattaacacgatagccctagtttagtggttaaatatgaataatcattgatcgtttttcaaaagaaaagggaagatttcctgaccaaaaaagcgccccagacaaaagtcctagcgcttttgaatccaaattaatcaagcaatgttgtttctttgacggcatcgattgtcttggtgcctgccaattgcattgtgattgataattcatggttcaaatgatcaatcacagaggtaacgccttgtgcgccccctaagtttaacccgtaaataattgggcgaccaattgcgaccaaatcagcaccactagcaagcgccttaaagacgtgctcaccacgacgaacgccactatcaaagatgattggtacccgtttagcaacttgttgtgccactaatggtaacacttcaaaagaagcaggcccaccgtctaattgacggccgccatgatttgacacccaaataccatcagcacctgcttggatggctaattcagcatcaacgggtgattgaatccctttgacaatgacgggtaagtgcgtgatttctttaatcttttgaatatcttctggaacaatcccttgtttagcagcagcatagatttctgaaatgcctttgccagcaccatctgagttactataagctgctaagttaggcattggtagtgggaattggaattttgtttcgatatccgtttcacgataaccacctaacgttgaatcaaccgtcaaaacaatgcctttaaccccggcattaacggccttttgtagtaagaattcattaaattgatcgtctttactcatataaagttggaagaattgtggtgcatcaggcgcagctgcggctgcatcttcaacaagtgtattagcatacgtactaattgagaagattgaaccagctgcggccatccctttggcagtatctacttcacctttttcgtgggctaatccttgtgctgctgaaggggcttgaataatcggcgtcttcaaatcaatatcccacaattttgtgtgcaaatcagcatgttcaaccccttgtaaaacacggggcataatcttcttttgattgaaggcactggtattttcagccattgtccattcatcttctgaaccgccacgaatatagccaaaggcacctgcttccattcgttccttcacacgaccttctagcgatactagatttaaaacatcaactgggtgttctgcgtcacttgtaggatatgtcataataattgtctctttctttttgtcaataggatcatgatatgggacttacatagtgattagcaaacatttgtactcgttttcttacatttgacttttaaacccaatatctcggcggaaaaagctctgcggatcggccaccagcactcattaagcccccggttgttgctaccacaccggcaaagctaaaatgactattagcccctttaaaacgagcaattggtgccaactgaagaattgccggcgtttgatttggataccctttagcggccaccacaacccctaacgtcacaccatctgcttgccagtccaaagtcggttgctgatgggttaataattgctgaaagacttgcgctaaatcaccttgcaaacgtggtagcaccacttgggtttccggatcgccaaagcgtacgttgaactcaattactttgatcccagttgcggttgcaattaaccccgcatataaaacgccggtaaacggtgtgccattagcggccatcgttgccacaactggtttgataatcgtttcaaccgctgtttgtaccagttgatcactaatttgcggtactggacaataggcgcccatcccaccagtattcggtccccggtcaccttcaaaggcccgcttatggtcctgggcaatcggcaacggatgaacttgatcatcggccactagcgccattagcgagaattcctcaccgaccaaataatcttcgatgaggatctgacgacgtccttgtttgaagaaccgccgaacggccgctaagccatccgccaatgtttcagcgatgaccacccctttaccagccgctaaaccatcggccttaatcactattggcaacgaacgcccttgcgaggcggttaacgcctctgattcattagttaccgtttgatattgggcagtgggcacctgtgctcgagccatcatttctttggcaaaagtttttgagccctccaataccgcagcctgcttcgtcgggccaaaaattgctaaacccgcggcttgaaaagcatccacaatcctagcgactaatggttgttctgggccaacgacggtgtaagccaccgcctgttttttagcaaacgcaattaactgctcaaaatcattgacgtcaattgcggccgtttttatctggtccaattgcatccccggattcccaggtaagcaataaacctgttcaacttgttcactttttagtagttcacgtgccagtgtatgctcacgcgcaccactgccaatcaccaagatatccatttaattgccacctcttaatgtttaaaatgacgtcgatttgtaaagaccatgctgacccctttttggttcgccatgtcgattgaatcttgatctttaattgatccaccaggttgaataatcgctgtaatgccgtgttcagcagcgtaggctacgctatcgtccattgggaaaaaggcatctgatgctaacacgaatggtgcttgcatcccattagctaatgcttgttccaacgcatttttaacggagccaactcggttcatctgaccggcaccaacgcccaacgtttgatctttagttgcaacaacaatcgcgttacttttgacgtgtttcaccacgcgttgcgcaaataagagcgcttctttttcatcttcagttggggctttagtggtgaccgtcttcaattcaaatgcttgatccgttaagcgatctctttcttgaaccaatagaccacctaagaccgaaactgttttgaaacgatccgctttagcggcttgttcaaaatcaagtgtcatcaaacgaatattctttttcttttcaagaattgctaacgcttctggtgcaaaactgggggcaataacaatttccaagaataattcatgcaaagcattggctgtttgaacgtctacttcgcgattcaaggcaatgataccgccaaaaattgagacggaaccagctggaaaagctttttgccaagcatcgtagatagttgtccccaaaccaacgccacaaggattcatgtgtttcatcgccaccacgcatggttcgctgaattctgcggcgactttaatcgctgcatctgcatccttaatattgttgtaagacaattcttttccgtgtaattgatgggcagcagcaatcgaaaagtcgcttggtaaagcactttggtaaaaggcagctttttgatgggcgttttcgccgtaacgtaacgcttgtttgaagtcgtatgttaaggaacgtttttcagggaattcaaccgcatcggcatctgatagatacctggcaatcaaactatcgtatgcagcggtgtgccggaatgctttagcggctaaatggcggcggtaagtgacatcatcttgttgcaattgtgccaatgtttcatcatagtcggcttgatccaccacgacgtacactgacttaaagtttttagcagctgaacgcaacattgatggaccaccaatgtcaatttgttcaatcgcttgcgcttgggtaatctctggtttttgaatcgtttctttaaagggatagaggttaacacaaaccagatcaatcggtgtaatctcgtgttcagcaagtgctgccatatgtgttggttcatcacgcttagccaatagaccaccgtgaatatcgggatggagagttttaacccgaccgtctaacatttcaggaaaatgggtcacttcattaatgggtgtcactggcacacccgctttttccaaggcgctaaaagtgccaccagttgaaataatttcaaaatctgccgctactaatccttgggcaaatgccacaatacccgttttgtctgaaacgctaatcaatgctcttttcatgtgttaaaagctccctttaattatttttttgaattaaatcataaattacagctggatataattgatgttcaaccgcgtgaactcgcgcttctagtgttgctagcgtatcatttgatttcaccagaacggttgcttgggcgataatcggccccgtatccactccttcatcgatatagtggaccgtcacgccagtttcactcactttggcacggtacgcatcttcaatcccatgaatccccggaaaatccggtaacaatgccgggtggatattagtaatccgctgaggataagtgcctagtaaaacgggcgtgataatttgcatgtagcccgccaagataatataatcgatcgccaaaggcgccaactgggtaacaattgcttgctcgtaagcttgacgattttcaaactgacgtggtaccaacaccgtcaccggcacctcccgccggtgcgccttttcaatcacagctgcttgcgggcgatcgcaaaccagttggacaatttcaagacccgcttgttgtaagcgttgattatcagcaattgcttcgaagttactgcctgtgccagatgcaaaaattgccactctcatttggctgtcaccaattcaaccgccgcttgttgacgtttttgaacggtcccaatctgataagctgttcctgtttggcattcaattgcgctaaaacagctggtgctgcttctggcgcaaccgccaagaccatcccaatccccatattgaagatgttatacattttcatctcagcaagttgaccatattgttgtaaggccttaaaaatcggtaggattggccaactgcccaacgttaagtgggccgctaaatcagccggcaacatccgcggtacgttttcaataaaaccgccacccgtaatatgtgcggcgcctttaatcacccgttgttgcagtagcggctgtaagtcttcaacgtaaatcttggtaggcgttaataacaagtctcccagtggtttgccaggcaattcaggcaattgactagcaactgtcaaattattttgctcaaaaaagattttgcggactaatgaataaccgttagaatgaatgccactagacgccaatccaatcagaacgtcgccggcctgaatcgtttcaccggtcactaacgcatcctgttcagcaatcccaactgcaaaaccggcaacgtcatagtgcttatccgcatacataccaggcatttctgccgtttcaccgccaattaaagccatattggcttgcttgcaaccttcgagcacaccagcgatgatgtcttcaatcttatccggatcagttttaccagttgctaaatagtctaagaagtataacggttgcgcgccttgcgcaacaatgtcgttaacacacatcgccacacaatcaatcccgatagtcgcatgttgatcagctgcaaaagcaaccatcaatttcgtaccgacaccatccgtactcgagactaacaccggtttttgatactgggccatttctagcgcgtattgtccgccaaagctgccaatattgtgattatcagcccctacttttttttggatgcgggtaacgacttcgtaaccagccgtcacatcgacgcccgctttttggtaagcatctgtcatctcgattactccttatcttgttttagactcgcttgataatctgcttcataatcgtatagcggcgttggataatcaccgttaaaatacgccatacataaccctgaatacggcgcatcttggtgtaagccaatcgcatcaatcaaaccttcttgactcaaaaaggccaacgaatcagcaccgattgtttcacacatttgagccacactttgttgtgaagcgattaattcttcgcgagtttgaatgtcaatgccgtagaaacaaggatattttaatggtggtgaggcgacacgtaaatgcacttctaacgctccagcttccttcaaccgtttaacaatgtgtttgctagtagtcccacgaacaatcgaatcatcaactaacacaattcgtttacctgccacgacacttttaacaactgctaacttgcggttaacaccctgctctcgcagtgcttgtgtcggttgaataaaggtccgaccgacatattgatttttaacgagcctcatttcatatggtaggccgctggcttccgcgtacccactcgcttccgcgctgcgtggacgttaatcccgcaaacatcagaatctggtcgtgcgaaatagatatattccatcgagcaaatcgaatgggtcgtttcggtcgtgaagaaatccgaatgtaagccatcgcgatcaattgtcacgacttcaccaggttgtacgtcccgaataaaagtcgcttcgaccgcattcagcgcacacgtttcactggcaacaacatacgacccattggccatttgcccaatcgataatggccggaagccattaggatcaagcatcgcaatcaaggaaccctgcgttaatagcacataggcaaaaccaccgtgaatttggttgagggccgttttaattttagtgtgtaaatccggaccagccgctcgccgaatgagatgcattaaaatttctgaatcagaactagactttaaaatggcgccctcatcttccaattgacgccgtaacgtgaccgcattggttaaattaccgttatgcgctaacgcaaattgaccatcggcaaaatcaaacaagaaggggtgaatattttctaaaccgtgactccccgccgttgcgtatcgaacatgaccgatagccgcttcacctgttaattgggctaaattttctgggttccggaaaacatcggctaatagaccgcgatcgcgataacctagtaactgaccgttgtcattcgtgacgattcccgccccttcttgcccccggtgttggagactatgaaggccaaaataggccaattggttggcatctggatggccccaaaccccaaagacaccacattcttcatttaagcttctgatttcattaagcatggtaaagccgcctcccaagcatccttggccgcttcaacggtcaagtcaatcatttcatctttcgtttgaatatgcattattggttcagccgttacccgaccaatcaattgggctgattggtcgctaatctgttcaaaagcagcttgatcggccgctttaaccgtcacaataaaccgcgattgtgtttcggcaaataattggcgactagccagatctacttgtacgtgataccccaaaccttgtttgaaggttgcttcagaaagcgcgacggctaagcccccttctgatagatcatgcgaactagcaatcaagccttgttgaatggcttttaaaacaagatcttgattagccttttccgttgctaatgagaaatggcccagttgacctgaaatagtgccttgttgcatcttttgtaattcactacctgcatagttatcgtcagtttcaccaatcaaataaattaaatcatcaacttgtttgaaatcttgcgtagtaatgtcttggatatctcgaattaaaccgaccatcccaatcattggtgtggggtaaatcgcttctccattaaattcgttgtacagtgagacgtttcccgaaatcactggtgtgccaaaaatatcacaagcagcagcaattccctgagcactctgatcaaattcccagaaaacatctggtttttccggattaccgtagtttaaacaatccgtaatccctaatggttgcccaccagcagcgacaatatttcgagcagcttcagcaaccgcaatttggccacccacgtggggatctagataaagatagcgaccgttacagtcagtcgtcatcgcaagagcctttttggtgccacgaatgcgcactacggctgcatcactaccaggtaaaacgacggtattggttttcacttggggatcatagtgacggtagaatgaactttcatccgcgattgttggttgttttaatagtgccaaccaagttgcctgagtgtccgtcacgctaggcacatagggcgcttgggcggcaaaggttactaagcgttctggttttgcttggtccttatgataaaccggtgcggcatccgttaaggccgccactggtaaatcagcaaccaattggccttggtgccatagttggtattgttctttggttgttacttccccaatccgaacggcatctaagtcgtagcctttaaataaagcaatcacttggtcttcataaccagctctaacacataaagccattcgttcttgcgattcggataacatgatttcataaacagacatgtcggtttcgcgttgcggcacttgatcaaggtctaaaatcatcccggttcccgctttagccgccatttcggcagttgatgaaaccaatccagctgcacccatatcttgaatcccgaccaaccaatccgaatgttgcaaaattaattctaagcaagcatccatcaataatttttccatgaatggatcacctacttgaacggctgagcgttgcgttgctttaccttcagcaaattcatccgatgcaaaggtggccccgtgaatcccatcacgtccagttttggcgccaacgtacaacacgctattgccggctcctcgcgcttttccttgttgaatatccttttgttcaatcaaaccgacacacatcgcattcaccaatggattggcttgatagcacggatcaaaactgatttcaccgccaactgttggaatcccaatacaattaccgtaaccaccaatcccagcgaccacttcctggaccaaatacttggtttggttatcattgagttccccaaaccgcaagctgcctaaaatcgcaatcggcgttgcacccattgaaaagatatcgcggataatcccaccgacaccagtagctgccccctcatagggttcaacagcagagggatgattatgactttcagccttgaaaacaacagcttgcccatcgccaatatctaaaataccggccccctcaccgggtccttgtagcacgtgagggccattcgttggaaattttttaagaatcggtttggagtttttatacgaacaatgttcactccacatgaccgagaaaaggcccgtctctgtgtaatttggcaatcgttttaagattttagtgcaaatcaattcgtattcactatcagttaagccccattgtcggtataacttggtttgttgaacctcagttgccgttggattattcaccatgagttactaccccgcttttcaaagttgtcaaaattgattggaagacatccagcccatccgcactgcccaataaggcttcgactgcacgttcagggtgtggcatcatccctaaaacatttcccgcttcgttcgtgatgcccgcgatattgtctaaactaccattaacgtcggttgtataagtaaatgcgatttggtggttggcgtgcaattgggccaatgtttctgaatcacaataataattaccttcaccatgggcaatcggcagcgcacctgtggccccttttgcatattgatttgtaaagcgtgtgtcgttattttcaacctgtaaagttaccgtttcgcaaatgaaatgcgtttagcgattgggcaacagcgcccccggtaataagcctgcttccgtcaaaatctggaaaccgttgcagattcctaaaaccggtttagcaaaagccaccaccgccgtcataattggtgccaatttagcaatcgcgccactgcgtaaataatcgccgtatgaaaacccgcctggaattagcaccgcatcaaaaccggctaagctggttgctgtgtaagagacataagccgcttcttcatggcagacatcgataattgcgtggtataaatcggcatcacaattcgatcctggaaaaacaagcactgcgaatttcattttgcgtcctacaccaattgtacgtcgtagcggtattgttccatatttggattagccaatagtcgatcgcaaatcgcttcaactttctcaatcacagcggcttgatccgtaccagtcacttgcatttcaaaaaacttaccaattcgcatttgactgatcccttcaaaacctaagcgttgaatcgcaccttgaaccgcttgaccttgtggacctagaactgaatctttataggtgacataaacttgcacgttatacatttgttgaacccccaatcgtttttgttaagcgttgtaaaaccgtctcgtagaccgtgactaagtcgcccttattctggcggaaaacatccttatctaatgatgagtgtgttttctgatcccaaagccgacaattatctggtgaaaattcatccgttaaaattaagcgtccttgatatcgcccaaattccaatttaaaatcaattaaatcaataccaatttcattgaataacttaatcaacaaagtattaatctgtttcgtcatcgcttcaatcgtagccacttcggtaggtgtcaccagtttcaaagccgttgcttgcgagatattaatagccggatcgtccaaagcatcatttttgtaataatattcaataatcggttgttctaatcgttgtcccaatggttgacaaaacttccgcgcaaagctttcggcgaccacatttctcaagaccacttccaacgggataatggtgacttttttgacgagttgttcggtttcagatacatttttgattaaatgggtttcgatcccttgttgacttaagtaagcaaaaattaattttgaaatttcataattaacttcccctttgccagtaatctgttctttccgcttaccatttaaagcagttgcttgatccttataaatcatttttaagacttcggggtcgtcagttgaaaataagtccttggctttccctgaataaagtaacgtttcactcatcgtttcttcctccaatagacatattattttataaaataattaataattgttcgtttttagttttgccataaaaaagctttgaaatgatcgctatttcaaagttcgtttatttttaacccaaaccaacacgctcaaaaatttcggccacatgccgaatatgataatgatagtcaaacgcatcatccaaatcagatggcgttagaatgctcattacctgttcgtcggcttctaataacggtctgaaatcaatttgttcatcccaagaacgggccgtcttaggttgaatcaaatcataggccgcttctcttgaaagaccgtgatcgatcaatttcaataacacgcgttggctataaatcaaaccaaaagtccgacccatattacgtttcatattttctgggaagaccgtcaagttcgtcataatttttgtaaaccgtttgagaatgtaatctaataaaatggttgtatccggtaaaataatccgttcagcggagctatgtgaaatatcgcgttcatgccacagtgccacatcttcataagccgttaccatatgaccgcgaataactcgcgttaagcctgtgatattttcagaagcaattggattgcgtttatggggcattgctgaagaacctttttgacctttagcaaagtattcttccacttcgcgcgtttctgatttttgtaaaccacgaatttcagtcgcgaatttctcgatagatgtcgctaataacgccatttcagcaacgtaagcagcgtgtaaatctctcggtaggacttgagtcgaaatttcttgagcccgaatccccaattgatcacaaacataactttcaacaaacggtggaatattcgcaaacgtccccacagccccgctaattttgcctgcttcaacaccttcagcagctgcttcaaatcgttctttatggcgttttaattcggaataccaaagcgctaatttcaaaccaaaagtcgtcggttcagcgtgcacaccatgtgtccgccccatcataactgtatcttgataacgtttagcttgcttaccaatcacttctatcaaagcgtcgatatcagctcgtaaaatggcgttcgcttgtttcaataaatagccgtaagccgtgtcaacgacgtcagtagacgttaacccataatgaacccatttccgttcagcacctagtgtttccgaaacggcccgggtgaatgccaccacatcatgtcttgtttcctattcaatttctagaatgcgaggaattgaaaattgtgcgttggctttaatcttagcgacatcttctgccggaatgtgtcctaatttagaccacgcctcatccgctaaaatttcaactgccaaccatgcttcatacttgttgtgatcggtccaaatggcacccatttcaggatttgtataacgttcaatcattttgtctactcctttggtaacgcccaaatttgtgttgcttcaatttcagaaagtgttttgtttagatcatcagtcaacaaggtgatatgccccatcttccgattttctttgcgctcagccttgccgtaatcgtgataagaccaatcagttgattggcgactcttggccagtgcacctggtacatcttggcctaagacattgaccattacagctgattgccaaaggcgcggtgtttgaagtggccaattgcaacccccccgaatgtgcgccatgaattgcgacaagtcacaagcttcaatcgttaaatgacccgaattatgcggtcttggtgcgatttcatttacaaacaactggccagttggggtcacgaagaactctaccccgagtgtccccaccaattctatttcggtcgcaattttctgagcaatttccttagcttcttgtgcaaccgccgccggtacccgtgcagggcaaatactaatatgtaatatgttatgccggtgttggttttcaatgactggaaaaagtgcctgttgccctgtccaattctggctaatcatgactgaaatctcttgatcaaaagtcaccatttcttctaacacacaaacgccaaaatccagaagtgctctagcggcttcaatatcactggcccgtcttaagacaagttgccctttaccgtcgtacccaccccgggccgttttcaagagacagggtaagccaatctcagcgaccgctttagttaattcactaatcgatgttacgactttaaaagcggcgtgcggtaatttctcggttgctaagaattgtttttccaaaacacggtcttgtgcaatccgtaacgccttggttccttgtggaatttgtgttaattgttgtgctttttcaatcgtcgttgcatcaacgttttcaaattcataagtcacgacatccgaacgtttcgccaattcaatgatttgattctcgtcatcgtaagccgcaacaatttggtcatcggctacttgaccggccggacaatcaacttgcggatcaagaacgatgactttaaagcccatcgacttagcggccaaggtcatcatctgtcctaattgaccgccaccaataatcccaatgacttgtcctggtaaaatttgtttagttaagttggtcattacttgccaccgccttttgatgaagtgcttgtttgtattgcactaatgccttttgataagttggtgttttaagcccgcagatttgggttgccaacaaaccagcgttaattgcgcctgccttaccaatcgctaccgttgccaccggcacaccacttggcatctggacaattgacaacaatgagtccatcccattgagcgccttgctttgaattggtaccccgataactggcagaacagtgttagcagccaacatccccggtagatgtgctgcaccaccggcacctgcaataatcacttgataaccttcttccgccgcactttgcgcaaaagcaatcatttcaattggcatccggtgtgccgaaatgacttttttggtataactcacattcaaatccgttaaaatctgagccgtttcctgcattgtttcccaatcagagatcgatcccatcacaatcgctacatcagtcattcgattagcctgctttcttaattgattatggtttgattttaacaacgacgacggcataagttaaagggaaatccgtattattttattatagttttataaattgtacgtgttacgcgcaaaataattaataaatatctttcgtaaaatattagttatttaaaaagacgaacaaaaaagagtgactcattaatgaatgagtcactctttttaaaggcgtttattatggtaacaggacaaacaataatgcccctaaaatcccaccaacgaatgggccgataactggaatccaactgtattgccagtcagaatcacccttgttggcaattggtagaactgcatgcgcaatccgtgggcctagatcccgagccggattaattgcatacccagttgttccaccaagtgataacccgattgcagtaatgataacaccaactacgagtgggtttaagccttctgtgaattggccccgtgtcaatgctaacaatgcgaatactaagacaaatgtcccaataatttcactcattaagttggcaaatggacttctaattgcaggaccggttgcaaaagtccctaaaatcgctgattggtcatctgtcgcttgccaatgtgggtagtattgaatccagacaacgactgcccccaagaaagccccaatcatttgggcaatgataaatggtaatacaacagaccatgatactttaccgatgattgcaaaggcgagcgtgaccgctgggttcaaatgagcagggcccataaatgctgatgcgtaaacacctagcgttacggcaaacccccaacctaacgtaattgcaatccaaccagcaccgttggccttagtctttgctaaactaacaccggccacgaccccgtcccctaagaggactaagataaatgtaccgactaattcgcctagtgcttggaccattattgaattatccataaggtttcctccttatttaactcactattttaaatagtcgagttgtgcttcagcaattgcggcatctaattgtgctgtttgacgttctttttcagcagcatcccagttcaagagacgggccatttcgttgataactggttgtttgatggctgccaattgatcattgtggaataagacgaagtttgtccgacgtaataaataatcaactggtgttaacgtcatttcttcgttaactgaatatctcaaactaatcgtttccttcaagttcaaaccttcagctgtgccttgatctgcatatgaaactacacggctaacgtttgaaccaaagcgattagctaagtcagtggcatcatcttctgaaatacccttgctcatcgctactttcgtgtagaacttcaatgtatcttcaacgttattaggatcaaaatgaccacctgatacttgtaacttcttagaatcgattttacgaaccgtttcgttgaagtctttcttcaagatatcacgaatcatttctaatgcgccagcagccatcttacggtaatccgtaatcttaccacctgataaagtcatcaagccgttttcagccactttaagtgaactcccacgtgagacttgtgaagggttaaccgtttcttcagcatgggctgttcttaattggctgattgctttttcaacatcagcacgagcagctgttttattttcatagtcatcaacagtcttgattaggttattgaatgattcttctgaaaccttaccactattagcaccaccgccattataatcagaactaccgttgtttgagattaatggtcgtaaaccagcccagcttgcttcaatatcgtttaatgcgatatcaacgctaggataacggttattgatagcctttaataagtaatcaacgtcggtttgttcaacacgtgggtgtttatagtcgcctgtgtaatctgtatccgttgttccgaagtatgtcttgccttcgcgtggcacaacgaaaatcatgcgaccatcatggagacctgaatcaaaataagttggttgtggcactgataagcgactgctatcaacaactaaatgaatccctttagttggacgaagtgtttcttgtgctttcacttcagtattcaaagcgttaactttatcaacccaagggccagctgtattaatcactaatttggcatgaatatcgaatgtttcatctgttaattcatcatgtgctttcaagccattaacgcggccattagcatcataagtcatcccaacagctttaacgtggctggcaactgttgcgcccaattcgtcagcctctttgatattttcgattactaaacgggcatcgttattcacaaagtccaaatagacaccagcacccatcaaacgatctgatttcaaaccaggttcgcgttggagcacttctttacgatcaattgtgtagttggcatattgtgtcccagtaacccctgccaatttatcgtataaatccatcgcaattttaacactgaacatgtcataagttgcttcaggttcatcataaattggtaaaagcattggtgtaggccgtggaatgtgaggtgcgatgccttgaacaaccgcacgttcgctaacagtatcagcaacaacccccacgtcgaaagtcttcaagtagcgaatcccaccatggactaacttcgttgagcgtgatgacgtgccttcagcgaaatcttgcatttcgattaaacccgttttaataccagatgcggcagattgaatggcgacccctgcaccagtgatcccaccaccaataattaataaatcaagttgttcgttctttaagttttgaatggcttgttgacggctttctaatgaaaatgtcataataatcctccttattcgttcatcttatatggacgatgtttgaaaatttttgttgcttcaatggcttgttgccaaccggcatatagatcttcacgttcttcttctggcatgttaggttcgaaacgctgcccaacagagaagatttgcgctaattcatctgtatcctgccaaaaaccaacagctaggccggccaagaaggcagcacccatggccgttgtttctaagtttgcggctttttcaatggcactatttaaaatatctgcctggaattgcatgaggtagttgttattagcagcacccccatcgacacgtagcatcttgatatcaatccccgtatctttttgcatagtttgaacaacgtcacgtgtttgataggctaatgattgcagtgttgctttaataatatcctgacggttcgtcccacgcgtgataccaagaatcgagccccgtgcttcagcgtcccaataaggtgcacctaagccggtaaaagctggcacaacgtaaacttcatttaaactcgttgaagctttagcagcagcttcagaatctgaagatttctcaactaattgcatgctatctctcaaccattgaatggccgaaccagcgacaaagactgagccttccaaagcgtagttcactttaccattgattgaataaccgattgtcgttaataagttattttcagacatcgttggcttttcaccagtgttcatcacgataaatgagcctgtcccgtaagtattcttgaccattccgggttgtaaagctaattgaccaaacaaggcagcttgttgatcaccggccatccctgaaattggtacgctgctgccataaaaatgataaggcgccgtttcaccataaacttcagagtttggccgcacatcaggtaacatcgctcgtggaatgttgagaagcttcaagatgtcgtcgtcccagtccaagtcgtgaatgttaaaaatcatcgtccgactggcattagtataatcagtgacgtgcgttgcgcctccggttaatttccaagtaatccaagtatcaattgtcccaaagagcaattcgcccttttcagcacgttcttgtgcgcctggcacttgatctaaaatccaacgaatcttggttgctgagaaataggcatcaacaatcaagcccgtcttcttatggattaaatcttcataaccatctgtcttaagcttttcagcaatgtcgttggtttgccgcgattgccaaaccaccgcattgtaaattggtaggccagttgccttgtcccagataaccgtcgtttcacgttgattagtaatcccaatccccgcaatctggttcggttgaatgccagatttaataaaagcgtttgcaatagtcgataaaacggcgttccaaatttcattagcgttatgctctacccaaccgggttcaggaaagtactgcgggaactcacgttgtgcatccgcgactttttgaccatcgtggttaaaaatgattgagcgagtacttgtcgtcccctcatcaatcgcaagaatgtatttttcagtcattttaatcctcctttaacaaaatttctttggaaaacgtttccttgttttttattatagattaccggtgtccaaaatggaagcgttttgcctaaattaaattttacacaatcattatagtgggttaaaagtcacaaaaaaagacggttgagcccttcgctcccccgtcttttaaacttatattgttgccactactttactgtataaatcactattcatcttacttaacgacgttttatcgttcttaacattcgagaataatacaatataaattcggccgccatgactaaagccgtttgaaacactccaaccagaaagatagccgcgattgacgattaatgccggatcattatacatgcccatcccataatgagaatcactacccggtttaaacattaaatcggtttgctgctgattaattaacttgtgagtccaaagcgccttatcaaaacggtacatatccatagccgtcatatacatatcccccacgccataaagctggctaaaattcggtaacatttcagcctttttaacaccacctttggtttcatacccgatagaggcattttctaactgtgggtattgcgctgacataaacccagtatgcatcattttacttggtttgataatcttattttgtaagtaatcttagtagttttgatgactcactttttctaaaatcttaaccaaaacaatatagttagcatctaaatagtgccaactgcctggttggcccttagtcccattttcaataatctcagctaataattggtcgctggtcttttcttgattgtcctgattacgtccaacaatgccagaagtatgatgcagtaagtccgtcaatttaatctgctgaccattaggaaattggggtaaatatttcgccactggatcggtaaccttcaacttaccttgttgatttaattgtaaaataccggttgcgatcagtgctttttcagttgacgcaattggatataacgtgtccggtgtatttaattttttggccgcttcattagctgtgccataccctttattaagcataattttgttatctttaacaattaatgctgttcctgaaaagttgacttgcttaaaatattgatctaacgtattatcagcaaccaccgttgacattggcttagttgcttctttttcacgcgctttttgtttttgaatactttcagatttaaccatcgccgctttttcactttgacgttttcgtcgttgcgtttgtttttcgattttttcttgttgggctgctttctgatcaatttgctctttaacaacatagccacccgctaaaaaaacacttaatgtgatgacaacactgccgatcatcattaattttcgtttcgccacctaattaccctccccaattgataatcttctctcgttattaataatgtacaatacttatgctagcattagaagtgacaatattgttatcttaaaaaggaacgctacctgaactttcatcctgaaataaccagttgcaacaaaaaaggcttatcccccgaagggataagcctttttcactaaatttttaagatcatcatttaaagattaacggtgaatatacatgtaactgccgccatctgaaagtgttgcagtatttgggccagctgcgttagcaaaacccatcccgccttgtgtaattgtgacactgctgccactaactgattgaacatacccaacgtgaccgtacgtaggatcagcagtccattgaccacctacagattgaccaggtacaaagacaatgattgcaccggctgatggtgtatgatcgacacggaagccagctgctgatgcagaagcaccccattgaccgccattaccccagttattgccagcccaaggtgcaacttgcttaacataccaagtacattgaccccatgcgtatgagttgccagcaacgttaccatgtgtgctaccgtcgccttggctatcactatcgtcattagatttctttgattcactattatcgcttgttttattttcaattttacttgaagtgcttgctttgctatcgtttgaagtacttgttgcttctgctttatctgaagtatctttagtagaaacagcagtctttactacttttgtttctttagccttagtatcgttagcaacttttaaagcagaagcagcttcatcatattgtgtttgtagcgcttctaatgttgccttattgtcattaaccttttggtttaatgcatcttgttgttgatctgatttagccttcatggccttcaaatcagtttgttgtgcttcaaaacttgttttttcagattgtaaattagatttagttgtttcttgttctgtcattaaatttgagtattctgctttagctgctttaacatcttctagtgctgatttacttgcttggttcaacttattgactgtgaatgatcttgcaacaagatcagaaaagtcttttgagtttaagacaaaatcaaagtaaacattgccactgacagtgtcccctgtttgtttttgtaatgcaacaagttgggccttaagcactgtcgttcttttttgaacttcggcttttgcgcttgtgatttgtgtttttaaggttgcgattttttgtgttgattgatcaatatttgttttagtcgtttcaattttagttgtgttatcagtgatttgttgttgtagtttgatattatcagcattggctgttgcaatatcctttaacaatttggctgtttcacttttattatttgtaatggcttcttgtgtttcatcaactgttgctgcattagctgcggctgtgtttagtgctgaaacggctaccatactcattacaattacacttgtgattacttttttgaaagacattttttataattaccccgtgttttattaataggttatagtatagaccaataatgttacattcatattacaaccaagttacaaccataagtctacttcatcaaaaaaccgctaataccaacagttaagggacgtaacagttgttccaagtaccactattactttgatactaaaaagagcaccaatcagctagcgattaaaaactaactaattggtgctctttttgaaattatgctttaacggtcttcttaccagccgtcttaatggcatcattaatgcccttagtatataaaatattgcctttttcaatgccaccgaaatgcgtcccatcagtgccttcaaaaacttctggatggctagcagcaatcttattccaatctgtcaccgtgataaatgggtatttagccggtaacgtccgttcatagactgcgattttggtactatcataagtcgcatctgcatgaccatcgtaaggggtcataaaaattagacgatgtccttttttcaaatcatgaataatcttatcgatttgttctttgaaatctggaaaagcattcgtcccgatacagatcacgacatattctcgcaattgattattgttttgttggttcatcaatacgtcatacgcctgatccattcgacggttgccttcagcgttaatgtcactatttttaacgtgttctaataaataactccgtgcgcctaatgtgacactgtcaccgataatactaatgccttggggcacattatagttagtttggctaactggcaccgtttgtttgggttggctaaccttagcgtgaaccgcctgaatttgatcagcgtcctgataaagattaccgacccagagatgttgttccaaagtagacatatgtggtgcgtcaactgcatagttggctgtcaccacacctaaaatcaccatcgcaaacaacaacggaccaccgaccgccttttggtaagcaactggtttgcccatcaaaagcggttcgatgtaataataagacagtgttgagaaaataaccgagccaattaaggccgccactactgctttaatattattgttaaagtaacttaaaaagataatgtacaatggccagtggaaaagatacattgcatagctaatatccgctaaataagtaatgaagcgtggttcagctacgttgggtgctttatcatgcaatagacgtgcaaaaataatgagacatcctgtgattaaactccctagtaagatgccataagcatacgtactagcttgatcaaacttcatacgcgttcctaaaccaaataataacaacgcactgaccacgaaaccaattaatggtgtcttccaggtcaagcgactcgttaattgattaaagccttgtgctgattgaccaaccccacaaaagctcccaatcatcgcaccgacaaagaatggataaccatgcgttaaacttgagaaataaatcggtgaatattcagataaacctttaatttgcgtaaacattgatagaaagctaacggcaaataaaacaaacgaaacactgaagatagccgttctgaaatacttcgcacttttgacagttcttgaaacaagatagacaattaagccccaaattaaataaaagtgcatttcaactgctaatgaccaagtatgcacaaataagtgcggaatgaaattagtttcatagctaccacccgtactaatttcataaaaattcgtcgtaaaacttaaagtggcggtaatttgtttcgttaaattcgttcttaaatccggattcgcaattgaagacagcggcaccgcgattagaaccattaataataatggcggaaaaatccggttaaaccgacgccgataaaatgcccatagtttcactttatcgcgccggataaattcatcaataaatagtgctgtgattaagtaacctgaaaaggtaaaaaacacatcaaccccaacaaagccaccggcatatcttgttttaaaatagtgatagtataaaaccatccctaggccaaaaatgcgaattaaactaaaccatctaattcttgctttcttgatacttcccattaacgagatcccccttataagtcacatggtttttcttcagttcaccttgaccataaggtgcacccgctttaaattggcctttatactgccaaccttcatgagaaataaattgaccagcgccttcaaaccgaccatttttaaattggccggtataatagtcaccattttttaacattagtttgccatcaccactgaaacggcccttttcaaccgcgccacgatactgcaatcgatcactatctaagttgatcgactgcaccccactatcgcgtggcttcaatgtaatcactaaacacacaaaaacaattaacaaaagaatactcaacataatgttagacccttttgaaaaaaaacgcttcacttgttgcattttgtcacaatcctcccccaaaaataatccccttggccattaatcaacgacattaataaccgtttccgttacaccaattaacacttatgctagctaacgtaattaaacccttaaaattgttagcaccataagcataccaactttatcataatttagatgtgctgccaatccagtattttaaaaactcatctatcattaactattcattattcctgatgaagacatcaaaaaagctagtcactaaagtggctagctttttcggttaataatcccatggataatcgagattaatttgttgattaaaggcttgttgatttttaaaattagctaagcgctgtacttttctttgaccataacccgcacagataaattcttcctctgccgtcgttggtgcaatctctggtaagttcggcgttttttccgtcgtgacaaaggttaaaaaagccgtcaaacctaagaaacgctccccagtttgtagatgttcaccaataatttttgtaaaaacttcaattgagcggtgaccaacaccaacgacgtaactttcgatacacaacgaatcctgtaatttaaacggcgcaataaaatttaattggtcaatactggccgtcacggtttcaacacgggctaagcggctcgccgcaattgacgccgcgccatctagtaattccaatagtcgcccaccatagaccgtctcgtgttcgtttaaatcgctcgcaaacactcgatgattgctaattgataaggtttggcgacaagtgattgtttctgccattcaaaacactccattcacaattaatccaaggtaggaattactaagcgactcgcacctagatccacttggtattgattttgttgttcttcccgcaaggtcatccccatatcagtcgcatagattaccaaacctaattgatgtcccgccgctaaatggtaatgcgttggttgtaagtctagttgtacctcataaaaagtacctgcgtcgactgtctcggtttgataactattgtgacgattctgtaaattgagatggcccttagtgatcaactgataaggactaagtgcccctaatttgaattccttcaaatcatcatagcgccagtgataacctaattgttgccccttagcggccaaaatagctggtgttgtgcctaagcggctaaataagccgtaatcaaccaacataacactcaacaaaccacgatcggtattgaccgcaactttcgttttcaactgtacccgaccatcaatcaccaattgcttcgattgagcctgtgacaataataataagcgattttgcgtaaagtcagattgtggtgctaataattgatcctgccaagcagcctcactgagatgctgttttttaaacatggcaacaccatcatcgctgaaatctgctacaggggtcgttggcgtctgatctaaccctagatgttctgggtcatttaagaaataagtttgacgtggattcttagggtttaaccaatcatcttgggtatgccaagtcgcttcttgcgtattatcctgaattgtcaccgttggtaagatttctgatgcatgattgtcgatatctaacaactgataactcaaccataggttcatcatatctgtaaaatcaatcgattggatattattcatatagatatgttgtccttggtgtaaaaagagtttcttttcgattggtagttgccgtaagtcatcccacagtgcgccggcattttgcaatttaacgttccaatcgtttaaaccgtgtaccaagacaacatcacaattaattttttgaacattgtcccgataattacgttctgcccaaaaggcattgtaattccccgtaatccgatcttgaccttctcgtaaagctgccaactgttcttcaaagagcgcacctgatttagtatgatccgctgcgtccatctgtctagtttgacagagtttcgctaaaacatccgcatcttctccttggcaatcaacaggcgccaccaccaagccgttttcacggtagtaatcataccaactggagatagccgcttcagcaatcacagttttcaatccttcaacaccggttgtcgcagccgcagtcgccagggtccctaaataagacttcccggtcatggcgactttttggttgcaccaccaagccttaatttcaatccgatctgttttattagtataagcccgacgattacccgctaaccattcaataatcgcggtggttgaggccgtttcttctggtgagccacacgtccgcatgccatctgaaccccgagtcccgataccgccagcataaaccgtcgcaaacccccgtgctaagaaataatcatttaacaggtagttactgtcatcagcggcttctaattccggttcagtcgtttctccgagtggttctctagcagctggtacagattgattggtcccagtcttcaaatccgccaagttaggttgaatggccgccttagcttgaatgggcacatcaacgttgtgcagatcggcatcgacatcattagtgcctttgtaataaggactggcagtatataaggccggtacacgtaggcctttttcagtttccttaggtctaaagattgtcgtttcgagcaagtcaagatgcccatctaaatcagtatccaaacttgattcaacataaaccacttcacgaataaagttttgcgtatcaaaaaccggttgggttttaccattaaagattaagaactcgggtgcggtcgccttttgccaatgcgcaaagaaaccacgattagccaaacaatctaaataaagcaacccgttttgactgcgggtcgttaataaaaggtagacagcttctaaaaagagttcttgggttaataccggttgatcaacatagggtatcccgacttttgccatgaatcgccgagggtgattaaattgaaaatcagttgtaaccttaaaccctagcaactgcaatgcaatattataaaacgtccgctgatcaaacgatgttgagatgcctgccaaataatcggctaagtttaaactagccgtcgcctggattttttgcatttgttcattttgagccgtttttgagtgggcctctgggaagaaccgtgcgaatatttgttgtgctaacgcttgaactgacaatgcttcataaccttcatcaaggagcttaatccgttgtaaggcctttatttgttccgaataagtggttgttaaccgtgcaaactgatttaatttcatttttttaccccatttctgcgaatttcaattgacatcagatacttcaattgcttataatatagcatgttgcttgatattctaaaagcaataaccaatcttttttgtcatagtagctcagctggatagagcaacggtcttctaaaccgtaggtcgcgagttcgaatctcgcctgtgacattttagcgtcattcggtacaattctaatagatgggaacgttgttaaatcaacgttctcatctatttttttatacgctaaaatgttaaaaaaacacagttaccacaatttaaccacaattttcggcgtaagcgtttaaattgtttaaagcccggcagcctaatatactaatgttaacaatcagctattttagaaaggacgttatcttatgtcaacaacatatcaaaaaatccttgtcggtgtcgacggttccgatatggctaataaagcttttatggaagctgttgaaattgctaaaagaaatagcgctgaattatttatcgcccgaattgtcccgaatgatattttcgtctcgccagatgcgagtatgtacgccaaggtgaccgctttggagaaagatcgggtaaaatctcaactcgccgctaacgtgcgttacgcgcacaaccacggccttgaaaagattaccccaattctagaagttgcttctcctaaaaaagaaattgcgattcgcatccctgaggaatttggcattgacctcatcgtcttagggattaccggtaaaggcgctattgaacgaatgctagtcggttcggtcgcccaatacgtcagcagccacgctaaagctaacgttttgttggtgaaataagggtttaaaaaggcacgtcctacaaaattctgtagtgcgtgccttttttgttatcctaaaaattaaacgttctaaaccaatcatgattaccctgctcttgaaaaatacgactatcaaaaccaccaagcgcataactcacgcccatgatcaccaatccaatcacaaccatcaataacccaattttaaaccaattcattcgaatttttgcgaacatctatgccaccgcctttgattgtcttttacttttccgaatcaaccaccgtgttaagccgattgaaaattgcacaatatatttcgaaaaataccacgttaaaccgccgattaagatgccaacacccaccatcgcaaaactaataccaagttgcatcatgccgactactgcaccttcgtttaacgtgacaaaacatgaaaaaactaagctaacggccccaccaatgatgctagcaacagccagcgtaccaccgataaaaggcccaatccatagtaataaataaccaaccgtgagtaaaacaattacggttaacaacaaactaccccaaagtggcgaacccaacaccaacaacacgaccaacgttactaacaataccggcgacattcttttgtgttgaacctgtgttggttgaaactgatctgctaattgactagcgatttgatgaggtgtctctaaactagcaattacggccgcctcagtttcaccgccttcaatacgatcatcaatcaattcatcgtaataatcaattgtattggcagcatcactcacaccatagcttgttaaagctgctgctaagtctttgataaagtcatttttagtcattatgcttctcctttaatatactcatagattgctgttacttgcgtccattcatttaaaaactgttcaatcgcagccgccccaattggtgttagatggaaatatttccgtaaacgtccgttatgagccacctgataactttcaatctgttcttgtttttcgagccgttttaagatgggatacaaagttgaatcagagatttcaatgacgcttgaagtatctttaataatctgatagccataggaatcggcttttttaagcgttgctaaaacacaaaattctaacaaccccttctttaattgcgcgttcatgtcatcatcctttcaaaatataatactatactttacatagtattatgtcaaacataatcacatataaaaaaaggaatccgggacaaaagtaacttttgtctcagaccccttcttgataaccgaatgttgctagtataaacgtgcttttgtcagtaactttctgcgttttgctaaacttgtcaaattggtgatttcatcaccgattcgcccagttctacaaatactcaaaagctaaacactgacaacacactctttttaaattagtctcgattaccgaaaccaaagatttggagcattgtaataaataagttaacgaaatctagataaagtgttaaagcacccatcacggctaatcctgagattgaaacttccccagttgaaccgtattgacgatataacaagcttagtttttggttatcccaggctgttaaaataatgaagacgattaacatcgcgtaagataagaagtactcaattgcagctgagcccatgaaagcattgacgatggttacaataataatcccaatcaagcccatcatggcaaacttcccaaaaccacttaagttattcttcgtcatccggccataagctgacatcgcgacaaagactaacgcacttgaaataaatgcggcgccaatctgaccgatgttatacgctaacaagattaccgtgaacgttaatccgttcaacagggcgtaagcaataaacatcatcattgatgctgacggattcttggttgctttgcgactaatctgaacgaccaaaatcatctcaacaatcattaatccccagaccatccaagtattactattgcttaaaatggctacggtttgacttgcaaaaactgtgactagtaaaacagcaacgagagccgaaataccaacacctaaagccattaatccgtatactttactaaaaaatcgtgattcgctatcgacattgacaacgcgtcttccatccatgaataatcacctcttaatatttctaacgaggtataatcctcggttagcaatattgtaacaaaaaatgactaaaacacaatcatcttgcctgaatctttaattatccttaggacttaagttgcttaataattcttcgtaagcatattcatatttttgaacatcgccggcacccatgaagacgactactggttgttcaaaatctaataatggtgacatattatccaatttaaggacccgaccacccttagtaatcttagcacctaaatcagcacttgaaaccttacctgatttttcacgagcagaactgaagatatctgttaagaaaacttcatccgcgaggtttaaactagctgcaaaatcatccatcaatgcaattgtccgtgtaaatgtatggggttggaacaccgctacgatttgacgatctggatatttttgacgggctgcatccaaagtggctttaatttctgatggatgatgtgcatagtcatcaataatcgtgacatctgcgactttcttttcagtaaagcggcgtttaacacctttgaagtctgccaattcacgtgcaacttcacgaccatcaattttttcgaggtaactaacggcaatgacagctaaactattaagtacgttgtgttcgccgtataatggcacgtggtaatgtccgatattttcatcgtgataataagcatcaaattctgatccttcaacagtccgttgaatattgcgtgcttggaaatcatcatttgatttagttccatagtaataaattggtgcgtttgattttagttttcttaattctggatcgtcgccccaggcaaaaatccctttttgaaccttgtaagcttctgattggaaagcatcgaaaacatcttcgatccccgtataataatcagggtgatcaaagtcgatgttggtcatgattaaataatctggtgagtaagctaagaaatgacgacgatattcatccgcttcaaaagcgaagaattgtgcatccttgatgcccttacctgtcccatcaccaactaagaaacttgttttggcaacgccacttaaaacgtgtgctagtaacccactcgtacttgttttaccatgcgcaccagcaacaccgatacttgtataattttttaagagttcgcctaagaattggtgataacgcacaactggcaagcccatttcgagcgctgtcttaatttcaatttgatcatcttggaaagcattgccggcaattaccgttaagccttcgtgaaggttatcggctgagaaaggtaaaatcttaatgtctgctttctctaaatcccgttgtgtaaaggtatattggtcgatatctgagccttgtacttgatagcctaaatcatttaatacgagcgctaaagcactcatccctgatcctttaatgcccacaaagtggtaaaccgtttcacttgttatcattttaaatgtcctcttttcagaaagtcactaagtatatttgaatcaaatccctttaagtttaccatatcaggcgtttgagctaaataatgaatccttaaaaaacgctattttatcaaaaaaagaggttaaggcaaaatatttttgccctaacctcttttgaattaacctaatactaaataatcttcgatgttgatgaagtaaaccttgtaccacgttaagaacgtgtaaattgtccaaatcttacgacgcccgttaatgcgttgttccttattagcatcgagtaacgctaataattggccttgatcgaagaattcactgacgaaatcttcgctaaagagcgctttgacttgttcatagtacttgtcagtttctaaccattgcttgattggcactgggaaacctaatttaggtctgttggcccaagcggctggtaaatgcttagcagatgcttgacggtaagcatacttagtatccttgctgttaatcaagtattcagtcggcacttgaccagcagttttagcaacttctgggtctaaaaatggtacccggagttccaaactgtgcgccattgatagtttatcagctttttgtaaaatatcatttaacataaagtgatgcatatcaatgtattgcatttgtgaaacgggatcagcatctttgacgcggtcaaagtctgcttgataattttcttgaattgttgtgtcattttgataagcgggtttcaagtattggttggcttcatctgaaccaaaaatacttgggttttcgatatcataaattactgattgaccggcatagaattccttagggttagccaagttcgtatataaatgaacacgaccagggaatgctggcatctttttgactgtcttcgccaatttagcacgggcaccctttggtaatttcttcaaactagatgtgaaagccttgattgttgtattgtgtgaatgcattccgtagttaacgtagccggcaaacaattcatcagcaccttcacctgaaagtgcaacggtcactttttcacgggcaaaacgtgataagaaccataatggcacacatgatgggttcccgtctggttcgtccaagtaatattggattttatcaaattcagcaaacgcatcgtccgctttaaccttagtttcattgaagttcaagcccagttcgtctgccaaagcatgagcggctgttacttcgttataagtttggtcgtcaaaaccaacactaaagacttcttgtggttgcaagatacttgttacataactactatcgaccccttctgaaagaaaggcacccactggtacgtcagcaacgttgtgcatcttgattgattcttcgacagaagcatcaattttcttaacttcttcttcgaaagataagttagaaggatcaaattgcatatcccaatacttttcaatatctaattggccatctttgtaagtaaagtaatgacctgcagggaatctgaagaccccttcaaagaaagtttcttgtaaatcattatattgattcatcatgaatgatttaagagctttcttgtttaatgtccgcttaaattctggatgacgcatgaatgttttaatttcactactaaacataaaggtgccatcatcaagcgttgtgtaataaaggggtttgatcccgaagaaatcacgggcaccaaataacgttttcgtttgtaaatcgtaaatcacgaacacaaacatcccacgaatcttcttcaaaacatctttgccccattgttcataggcatgcaaaattgtttcagtatctgaatccgtcttgaattcgtgacctaatggttccaattccttacgaatttcacgatagttatatacttcaccgttaaagaaaatcaatttagtatgatcttcattataaataggttgatcacctttagttaaatcaataattgataagcgacggaaaccaagcgccactttatcatcaatgaaatcacccgcaccacttgggccacgatgtttaatgacatccatttgttggttcaatacttcttttttctttggtaaatcaaacaatccaccagcaaatccgacaatcccacacataccgtaagctcctctttgatagtccgatatctaaacaatacttattagacttttaattaattattttcagaaaaatttaaaaactaaataacaattaattagacggtgttaactaattaattgttatttactatcatactattttatttttaataagcccataacaaattcgtaagttacttatttattttaatagtgcggcaactgcatcagccgtcactgcttggccgacttcccaatcatctggtaagaccataatgcctttagcaggtgcaccttcaacgccaatttcacgagcagcacaaatcataccgtcgctttgaacgccacgtaattgaccaggccagatgattttaccttctggcatcactgcgccaactgttgcgacaatcactttttgaccttgagcaatgttagcagccccacaaacgatttgaaccgtttgatcaggtgcaatttgcgtttgtgtcacgtgcatatgatctgaatctggatgaaccacacattcctgtacataaccaaccacgatgtggggtgtttcatcagcaactaaatcaggtgtgaagccagcagcttcaagtgcttgatttaaagttgcgacatccgcaacactgagggcttggaccccgttaaattgtaattcaggtaataattgatcgattgctaaaaagttatagccaattgtctgatctgcttggtcgctaattctgacaattgattgtttctcagtcgttacttgattagcaacatctggttgggtcatcacaacgagaatatttggaaaagatttttggttcatacttgcaattagcattttatgactcctttaaaattaacttaatgagtggataaattctgaaatttcacgttttgtcttccggtccttattcacaaaacgaccaacttcacggccattatcaatcacaacaaagcttggaataccgaagatttcccattcttcacaaatatcgatgtattgatcacgatcaatttcgataaattcatattctgggaattcagcttcgatttcgggcattgcgggtttaataaaccggcaatcgctacaccacgttgctgtaaaaaataagacatgttttcctttggtaatgagatgggttagatttgtttctgccatctttgcgaattctttcattatgcaccccttcaatttaactactcgttttaatataagcggtttgtggtcaaatgtccactcttgttcctcaaaaaagtgtgctatactatttaaagataaatttactgaggagtttttttttgaaaaaaaatagtcaaacgttaaaatatctcttaactggtttcggactagccgttgcggcagcagccggcaccagacaatataaaacccaacaaaagatggttaagctcgataagattttagaagatgtcaaagcaagccttcgtcatgaagggcaaatcgtcggctcatggattgaagaaagtcctcacctattttcacaaaacaaacggactttcccggtttatcaaggcggtatcatctgcgaacgtgatgaaggcacaaatcaatttcacttcaaagttgatgctaaaacgggggttgtcattgagttttcacaactttaaaacaaataaaaacacttaccgaaattggtaagtgtttttttgtttggcttgagcggttattttaaaaaacacgctatttgtagtgcgcttctaatctgtaaatgacttgaccgcgcttgctgaatttttcttcgtattctgtttggatattgtcttctgctaaatcactgttgtgtaaatcaagtgaaatatcgtcaaaaaccatcccatatgcatttaaactagctaatgagtattcaaacaagccttggttatcggtcttgaaacgtaaataacctgttggttgcataatttgttggtattcagccaagaatgacttataagttaagcgtcgtttttcatgacgcgttttaggccatggatcagaaaagtttaagtaaacccctgcgacttcgttttcggcgaagaaagttgtcaatgctgcgccgttccctaacaataattgaagattagggagttttaattcaacttgtttttgcaaaataacggcaatcgctgattcttgaatttcaaccgcgatgaagttgcggtctgggtatttttgagccatttgagtaatgaattgccctttacctgaaccaacttcgatatagattggttgttccttggcaaaacgactttgccagttaccggcaatattttctgggctcaacaagatcatatctggattttcagcgatcaaatccgctgcccaaggtttgtttcttaaacgcataataaactcctcatttgctgccaattaaaagaggctgggacaaaagttattttgtctcggccccgcaatctgattaggataaacgtgtgccagcaggcatattcctgcgtttagcgacgtctggcaaataaccaacaagttggccattcaccagactatgctaatcctcagaatattaacacctgttggcacactctttggcatttaattttttttaattatttcagaaagaacttcttctaaacgcaatatgtcatggttcatttcagtaaaacgaccacgttgataatggtgcttaatgctttggagtaggttcaaactaccgtaccagttaacgcgcatcaataattcaggcgttacctctaaaccatagttttcaagccactcttgccattcttgacgtggaacatattgaaataaaatcattccgaaatcgacagctggatcagctaacattgctgaatcccaatcgactaggtacaaacgattgatatcagataacaaccaattcttatgacttaaatcgccgtgacacacctctaaagaaggtgtttgtaatgctgacatcgtgtcttttaaatactgactcgtttgtgctaaaaaaggatgttgccgcaaatcttgcggtaaatcatagaagtaggtttgcaacatctctggtgcttgccagacctgacccccaaccttttgtaacatgcgctttaatagatgagattgatgaacccgcgccaataacttggcaacttgcggactattcatctcatcacgcttgagcgtacgaccatttagccattcttgtgcggttaacacatcaccgcttgaaatccgtttggtccagattaaacgtggtgtaatgccttctgcagaaagagccgctagaaatggcgacgtatttcgttttaaaaatatcttctctgatgcacggacgcctaaataagcggcacccgtatcaccaccagctgaacgtacttgccaaccggtatctaagtcgaaattcatccacccgactcctttacaataaaataaggtgcctaccccgtggcaccgcgttgcttcaactgatttttaactaccagtatcatataataagcacacgtgctacgtcaagtaggcacccctttgaattcgggattatttaactaatcgttgtggtaaatagaactgaacaaaaacaccaactaaggcgaataacgccagaacacttaacccagcttggaggtccaagcccatcgtcactagcagtatcacgctaaacaagatggcttggcacaataataaacctaataacagttgttggaaagctttcacgcgagcttgcttagcaatcggatatagatgggtaaaaataatttgttcatattgagtataaaacggtagcaactggaagccgactaagtagattaataacaaacctagtgctaagctcaaccaccacagatggctgaaacatagaatgatgcctcctaaaaccactaggcgaacgtataatccgctaaactcggtcccgcgaataaaaccacgtgtgtagagatacaaatatggattaccactacgcttagcaactggcaatagccaatctaagtaacggcgccgtttgacctggctatttaaccccggtacatctgtaaagaggttgtataagcgataaatacgccccattctagaatcttctgcgctgaccgctgccaaccaatcaaacaatgttgtctgttgaatagttgtcaattgacgtcgttgataataagccaagccaattgcgattaaaaccccagcgattgccaagccgctaaagagttgactaccaattaacaaccaatcaactagtaaccaaacaatcttaggtaacttggcatctatctggtaccaattcaataattgatttgaaaagcggcgatctttgatcgcgattaatgtggcccaaactaggagtaattgccagctcggtacggatttagtaatcagcagggttggtgcaattaatcccgttactagcccggtaaaaattaccggcagccaggcactgtgaccccgcgccgcttttaaataaacaggtaaatcactttccttaggtaataagaaaacgctatccgcttctttaagtaatgttgcaaagcgcccacagctaactgccgctaataagacgagactcaatagcaatttaagccaccacgcttgtggatccagccctttgacggcattagcatacgtatagcctaatgcacccaataggaaaattaaagctaagacgaaatggtcgttaaaaaccagtttgagatatttaacttgttcttgaatatgttgccgaacacgtttttgccataactgtcgcatcattaaccttctttcgtcatttgcaaatagatatcatctaagtttgcatctgccatgttaaattctgctttcagttcttcaagcgtcccagttgttcgaaccttaccttgatttaataggacaaaagaatcggcgtattgttgcgccgtggccaaaatatgggtcgacatcaaaatagccgcccccgccgcctttttatcagcaataatgtccaataaatcgtgaatggcgagtggatcaagacctgtaaaaggttcatcaatgatgaataaatcggcgtcagtcataaaagcgttgacgatcatcactttttgacgcatcccttttgaaaaatgaactgggaaccagtccagcttattgtcgagtcggaacttcttcaataacaccatcgctttggcccaagtcttctcgaaatctaaatcgtaagccatcatcgctagttccagatgttctcgtaatgttaactcgggataaaggactggcgtttccggcacgtaagccatactttggcggtattgatccggattagattgcaacgtgacgccattaagcgtaatcgtacccttttgcggcattaataatccgataatatgtttaatggtcgttgatttaccagccccgtttaagccaatcaagccgacaacctgttgattgggaaccgtaaaacttacttcttggagcactggtacgtgggcgtaaccacccgttaattggttaatttctaaactcatttaacttgcctcattcatttaaattaaaaattagttgatacccttttctgacaaacacttaacacgaagtttatcatcaattattaattttaacaaaccctttcatttttaacgaacgattcactcaattgaccgtgatttagtagcagaaaacgcgttattatgatagcattaaccgtatacagcgccacaatcttatagaaagtaggtatttaattatatggatgattgtattttttgtaaaattgttcgtcaagaaattccgagcactgtcgtctatgaagatgatgttgtcaaagcatttctcgatatcacccagaccacacccggtcacaccttggtcattccaaagcaacatgttgccaatattttcgaatatgacgccgacttagctgctgcggttttcagccgagtacccaagattgcgaatgcaatcaaggccagcaatcccgcgattaaagggatgaatatttgtaataataacggtgaggttgcttaccaatccgttttccattctcatatccacctactccctcgttacacggcagcagacggcttctcaatgcaatttgctgataactcagcggattatacaccagagaagttacaaacgattgctgacgcgattaagcaacaattggaggcttaacgatgtcattttcaaaaggattactgattggtggccttcttggcacaacctatgcgttactaaccgctaaaaaaacgggcttagaacgtcaacaagcaatcagccattatttaaccgacgttaccatgcaagcacaaactgttcaaagtaacgctgtagatttacaaaacacggccggtcaactgtctaacgaaatcaaaacaacagctgttgattcactcgctgatatcagcgatgctgttcaaactttttcgtttgaagctcaaccccgggttgcacaaatttcagaatcaatcaaacgtcttacggacgatttaaaggcgctataacgcagtttatcaacctttcacggacgtattcataaaaaagctaaatttgaaggttctgtgaaattttcgctctcggatttaattcagcgggttcatgtgttatattaattgatgaattcacggtattaatcgtatttacaataatttataaggatgtgtcatatgatgaaaaaatggctattagccgctgccagtctattaatggtagttacattagcaggttgtggaagcaacactatcgcaactcttaagggtggtaaagtcactcaagacgaattctacaaagaaattaaggaaacttctgccggcaagcaacaagtacaacaaatgatcttgcaaaaagcacttcaagaacaatatggtagcaagagtcttactaagaaaatcgacaagacttacaatacttacaagaaacaatacggttcatctttcacttcagtacttgcacaaagtggtttaacaacctcttcattcaaaaaccaaatcacaactcaaatgttagctaacgctgctttaaaagctaacaaaaaagttacaaacgctgatttgaagaaacaatggaaaacatacgaaccaaaagttgaagtacaacatatcttagttgaaaagaaagatactgctgaaacagttatttctgaacttaagaaagacaactcaactaaaaacttcactgctttagctaagaagtactcaacagatactggtactaagaaagacggcggtaaattacctgtctttgatagcacagatacatcattagatccaacattcaaaacagctgccttcaagttgaagacaaacgaatacacaacaacacctgttaagacatcatatggttaccacgttatccgcatgatcaagaaccctggtaaaggtaagatggctgatcacaagaagacattaactgaccaagtttatgctaagtgggctaatgatcaaacagtgatggctaaggtttacacgaaggttcttaagaaagccgacgtaacaatcaaggataaagatttatcagatatcctttcaagctacggcgttaacgctaaaaaatcatcagctaaatcatcatcaaaataagcacatctaaaaagagcctcaatcaaacagattactgtttggttgaggctctttttttaattaatcctgcgttaattgttgatcgttaacgggtcggtagaaatgacgtccatccattgcaaagagccgttcagtatactgccccgcttctgcatgttgcaaggattgagtcatcatcgtaatgctagcatccatttcatcgatttgatggagtacttctgcttccaaaatttgtggtcgcactggtgaaccatattccattaaaccgtgatgagctaagacaacatgtctcagcactaacatatcttcactattgatgtcgatttttagcgtctcacaagccttaacgatttcttcatcaactaacacaatgtgcccgattaaattcccgcgcactgtgtattccgttgaaaccggccccgataattcaagcgtcttacctaaatcgtgcaacaagacccctgaatacaataacgccgcatcaatttgtgggtattgggcggcaattgttttagctagtcgcaacatcgataacgtatggtaggctagcccgcccgcaaaagcgtggtggttagtcttggccgctggaaaactgaagaagtccgcttgatgcttttgaatcaagtggcgcaccaatcgttgccaattaggattggtaatttcaaaaagcacttggctaatttcttcttccatatcggccgtttgtaccggtgctttttggataaattgttcaatgacctgtggttcctcttcagtcgctaaccgaagtttatagatcttaatttgtggattactttgataaagttcccgtttaccttggagatgaataatcttccccggtgtaaataaggccacatcttcatcagaagcatcccaatacttaccactaatttgtccggattgatcttggaatgtgaaggcaataaattgcttgccgtttttagcaactctgacatccgctgctttaattaaaacaaatagcgctaagttttcatcattttggtaatcaaatagctttttagtcgtcatttgctaaccctaccttctctaagtttaaccagtgttccgtgccaaaggcggcctcagttcgcggattagccgtcaagtaaatgacttgatgtgcaccgctgaggttttgcaataattgccaaaccgctgcttgccgctgatcatcgaaattgacgaacccgtcatctaccaataatggtagtgagacaacatcggcaatctcttctgcaaacgcaaaacgtaatgcaatgtataattgctctgccgttccttgtgaaagttcgccgacttcaaatagaacctggtcttgtcgaaggacagttaaagttgccgcttcgaaagtaatttcaatataccgattctgcgttagaattgcaaagtattgcgtagcttttgctaataaacgtgggaatcgttcttgtgaagctgctgttagggtcgcttgaatccaatcgattgccaattgtttagccaaccaatcttgtgctaaaccgataatgtcggcttcagcgtttaattgtgcttgcttttgtcgttgataagcatcgctatcaactaacttttgttgaacaacttgtaactcggcaatcgtctgttgttgtgtttgaattgccgccgttaatgtcgccgtttgttgcgttaattgtgcaattgccgtttcgagggctgcttggtcctcaaaagcttgtaattgtggcaaataacttgtcaattcatgttcaagatctgtttgacgttgttgttgcacttggcgttgctgttcagcggctgcacattgcgctagttcagcggccgttttgagctgggctttttcaagcaagtcagcttgttgcacttgtcgttcttggtcttgtctttgcaagcgtgtcacttgttgttgttgatattcataacgttcattatcctgcgcgagagcttgtttcaattgatcaagccggcccttaaattgttcaatttgcgccaaattatgcagtggttcgccttgaagcgcccctagccaatcgtgcgcaaacgcaaactgttcaaaataatcagttaagtcagcttgactcgcgttaatctcagcactttgttgggcaattaatgcttgtaagtgttgcatccgcgccaaggcatcttgttggttcataacttgtgtcaccgttgcttcgttcggataaccattcgtgcttaaaagcgtagcgacttgttgttgacttgtgcttaaagcctgctgcccatctgcaagtgctgtttgtttttcctgaaggtcggcttgtaactgatcgagtttagcgagtgcttgttgccactgcgccttttgggttgtatcagccgtttgtttttgttgcccttgatacttggtgtataacccatagccaagtaacccgagtcctaacaaagcaattgctttcaagccccccggtaaaaagatgcctaataaaccaacaacccctaatcctaaacaaatattgctcatcggtgttggactagcaacttccgcgggtgtttctaaaatggtgactaattgttcttgttcagccacctggtcagtcaaggttgttaattgatccgttaaaacgcggttggtcgtttgcgtttgttcgtaggtggtattggcaacttgtaactgttctagctggtcggcgcttaaaacagttggtaatgtttcagtcgtcggccattgatacttagcagctaatgccgcttgttcgctcgtcaactgcgtcaactgtgtttgttgcaaggctaactgttgcgcttgcttttgccgtgttgaccattgctccagtaacccatcaatttcagcttggtgtgtttgatagaaccggaattctcccgtttgatcaagcgtttcttgaatcgtcgccacagcttgctgagcatccgctaatgctgcttgagattcttggcgttgttcttcgattttttgatattgcgcatacaaagtgctatcaaaaggctgcgttgtcgctaaggatgcttgtaaagcctgccattctacatacttcggccagcgttctagtaattgttgctgctggtttttttgtccctgaacttcagctagtgctgcctgatcttgcttcagcgtctgaagcgcctgttgtaattgttggtcgttgctttcgtattgctgattagccgctttagcctggctaacagcctgttcaatttccggatactgctttaaggccttattaagtggccacttgcgtccggatggtttatagatttgctgactagccttatctaagctagcttcaaaagcaagccattcatgactaccaaccgcaccaatcgttaaaagatgttgcataaaatcatcggcagttagcccaaaaatctgatttagatcctgttgattggtctcaaaaatttgcgtaaagagggctttgtctgcgggcgcaatcaattggttcaaataatccgcaccaaactccttgccctgatcaataatggttacctcgccaccggctttaccagcaacccgccgaatcgtaatctcgcgatcgtggtggtcaacgattaactcgccaccatactgcgcgccacttttagggaggtattgttcatacttttgcttaccagttgcaaaaccaaacaaaacgcctttgataaaagccgtgatggttgatttaccagcttcattttgaccgtataaaacctggtaatcggtttgtaaatcaattgtttgatcgtgccacttaccaaagccaaagatgttaattgttttaatccgcatgcttagtcctccagcttcttttcttgtagaatcgtttcggccgcggtcttcaaatcctcttgaaaatcgggttcttcgagtgcttctcggatgaatttttctttcagaagcggttgggccttttccaagatgtaatctggcgtaaagatcttatcagccgccgcttgccaataggcctgatcaatctggctaaattgttgttgggccgcaaactgtagtttaagcgcgtatggccaatgcatgacagcgctagactcaagggctgcttgtaaataaacgagtaattcgccattattgacacgttgaatcaaatcactcgataaccgttcagcgtgcgtcaattccaaagccaccaaactcgccgtttcactctgtgctaattgctgactcaacgcttcttgcaattgattcaagcttggattttcagggatttcaaatcgttgacgttgccattcaatcaccgtcgtcggtttaaattcaagctcgaattgaccggcttgagctgtcactaaataaaaacccttttcaccaggttcgttcttatgccggccttgtaaattacccgggtaaatcacataaggccgttcttgtaagatttggcgtttatgaatatgtcctagtgcccaataatcatattgtagttggttgagttcacttaacgtaaacggtgcgtaatgatccgcatcagatgccgtactctggctaccatgcaaagtcccaattgtataagtcgtggcagctcgtggtggaaattgtgtcgtttgatccgtttctaaccaccgttgcccgtaactaaaaccaacaatcgtgaccgtttcttgcgctttagttgttagtgttttagcttcaacagccgttgtaaaaacatggacgtttttcggaaaatcgaaatgaatttgattgggatcccagtaatcatgattcccgtaactgagataaactgggatttcaacagcgtttaagcgttcaaattgttgtttcaaaaagttttggacctgcaaactctgggcctcttgatcaaatgaatcacccactaataaaacaaaatcaacagcttcatcaatggcagtctgcactaatttttcaaaggcggtaaaagttgattcgtgaatcgtcgtccataaattggttgacgctttttttagtcccacaaacggactatcaatatgcgcatcagccgcgtgaataaatttcatgatcgttatcccccattttagtaatatgtcttattatagcattgcaactaaggcttagaaaggcgccttcccactaaaaaaagaagcatcgagttcgcgatttgcgactcgatacttctcttaaaaaatacggtttagccttggtagatatcagcaattggttttgagatgatttgatttaattcatccatcaattggcttaattggcgttcttgttccatcaagttcttgatggcatcgatatcaccgattttttgagcaagttcttgaatttcttggatttcgtcatccgttaattcttcaccttgcatttgtttttgttgtaaagtcatttgttgtgtttggaatttcttgaacattgtgaaggcaatatcatccttcttaagtgctgcaaaagcattttgcaagcctaaaaattgtggtaatgtttgtaaattagttgccatttggttagcatcatcataaatattgactgtcatagtagtgactcccttacatgaatttaattaaaaaaacctttcaagttattataccattgattgaccgtttctttcgctttatttacaccatctttaattccagattgaagcgaattgacaaccttatcagaatcctgatcgtcttcttttttagccatcgattgggcgtcttctgtatcaaagttggtttgggccgtcgttggtaataactgttgcatttcatatttaaaaatcggcgctaggccgtcgatactggtatttttcataaagtgttcttgatccgtcttatcatagcccatccaagtcgcaaccacaatatccggcgtataaccgattaaccattgatccttcgtcccataaccgtaactgtcaggtacttcggtactaccagacttaccagcgacttgatagccatctggtttggcatatcgaccagtcccactgttataaacacccaacatcatgctggtcatttctttagaggtcttcttgctcatgattcgcgatttcgatggtgtcgtgttatcaacaataacggcaccactggcatccacaatctttcgaataaagtgggtctcggaaagttccccgttattagcaaaagctgtataagcactcgccatttgatgaggtgaaaccccaccttgccaaccaccaagggccatcgctagattttggtcactcttaggcactgaaatgccgaaatcttccaccgacttaatcccgcgtttaagcccgatttgatttaacaaccaaacagcaggcgcattcgtactgttagccaccgcttgatacatcggcatcgaaccggtataaacattgtctgggttggttggcgtatatttattagttccgtaactcttcttcttatcttgaagagaagaatcgtagtgatagccatcttctaacgctggtgtataaaccgccaacggtttaatcgtcgatcccggttgtcgtttcatctgagtgattcgactataaccgcgaatcgtgtaatcgccgcgcccaccaacaacggccgacacaccacctgttttcggatcaatggcaatggagctgccttgcactaaggtgccatcagccgcattgtctgggaacaaccaattttgctcgaaggtattttccatcttgctttgttgtgattgatcgagtgcggtataaatcttatagccgtttttaacaagatcttcttccttgagaccaaaccgcttaacagcttcattcacaacttcatcaaagtagtaagggtatttgtaactatcgttttgttccaaggtatttttaacgaccaatgtttcactcttggctgccttggcttgactctcagtcaatttaccattatcaaccatcagaccgagaattaaattccgccgtgatgtggcgttatccaaatgatcagccggattatagtaacttgggcttcggagcatagcagcaatcacagccgcttcactagcatctaattcgctagcgtttttaccgaagtaccgtctagaagcatcttgaacgccccacaccccgttaccgaagtaggcattatttaaatacatcgccaaaatatcttttttagagtaagtcttcgtaatttgaaccgctaggaaaagttcttcaaacttccgtgaaaaagtctgcttctgactcaacttcgcatttttggcgagctgctgggtcaacgtactccccccaccggtaatctgaccatgatgaatcactaagttaacagcggcgcgggccaagcccttgacgctaaagcctggattcgtatagaaggagcgatcttccgtcgaaatcaccgcattttgaatctcaggtgaaattttatctaattcaacgtacgtccctttttgggtgtataaggtgcccgcccgcgcatcttttttatcataaagtgttgttgatgtttgtaagttggccttaatttccccaacgttagccgtttttgctttaaaggttaagtagctactcatgaaaaatactaaaagtaatatgcccaaaatcaaccatcgcgttaattgcagtcgataccaaacatacttcacgactcgccacgcccgtttaaaaaaacgtttaatcgccaaccaaatcggcgaatcctgcttattcatacaatccctcttttaatcaatttacatcgtactttgttatattgtagcatattccagtacgccccttatgccagtgcgttgacattaataatcttttaaaatttacttttagtgctaaattcgctaaactggtagcttgaaggtggtttactctgatgataatttaccaaaaaaaagtaactttagaaacagactttagtccgatgtcagtccgcggacttctcaatcactggttagtgccgcaaaaaatgcaacacttcttgcggattaatcgtgaaatactcgtcaacggacaataccgcgcgtttaaccgcaacgtagaatctggcgatgaaatcacgctgaatttttcagaagtgtccgtcaaagttcaaaactacgaactagatgcgacacaatcattcagtgttttatttgaaagcgacgatttattgatcgtcaacaagcctgctggtattaaaacccatcccaaccgccctggcgaaaacgggacattaatgaatcaagtcgccttttatctcgcccaacaagggaaaaaagcctacatggtccaccgcattgacgaagccactagcggcgtcttattgattggcaaaacgccgattgttatcggaattttaaaccgtcaactcagtcaaaaaaagatggcccgccagtacattgctatcgtcaatgatcccgaacacgaattagcagaacacgccacaattaattcccccatcggtgtcgacccggaaaatgatcgtcaacgttgtgttgattacatcaacggtttatcggcgattacccactaccgcgttttaagtcggaagggcgcaactgcagtattagcggtcgaccttgaaactggccgaactcaccaaattcgcgtccacttggctagtattggtcatccaattctaggtgatccactctataacccgacggatacaacaccgcggctcttactacacggtcagacgttgcggtatacagaaccttacacggatcaaccccgaaccgtcacagccccagttcctgatgcatttgaaccttatctttcataaccaaccatcagttgggcatcttctgaggattgacattcggcgttaaccgcaaggagatgactgatagaacacgtttagactgttaaaattcgaatatccaaaaaggagccaagacaaaatttacttttgtcttggctccttttttagcgcttttaatgatgtgcttgtggtgcttctaaacggcgttgaatgaaccctaaaacgagatcggcgataattgccatcaaagctgttggcaaggccccggctaaaatcagcgcaccgccgtcggtcgcgttcgtccctcgaatgataatatcgcccaaaccaccggcgccgacaaatgagccaatcgcggtgatcccgattgcgactacaagcgcattacgaatccccgccataatcacagctaaggacaggggtaattcaaccatcgtcaataattgccacttggtcatccccatccccagaccggaatccagaatatttggtgagacattaatcatcccggtatacgtatttttgataattggtaataacgagtataaaaagaccgtcataatcaccgtattagtgcctaagcctaaccctaacatgatgatcgataacatcgctaacgacggcaccgtttgaataacgttggcaataccgattaccacatcgctcatttttttacgatgcgcaatcaaaatcccaatcggaattccaatgatggccgctagtaacaccccatagattgaaattaagaagtgccggttaaattggcttaaaacgtaaccaccattatgttggaaataataaagtagctgttgccacgtgtttaaatgcgtcatttgttggctcctttcttaaagtaatcatgttgcgtcaagaattgcttagccaccacagcgggttctagcaagtcgttatccactttgtagttgagcgtttgcatcgtatcaagattgatttgcccggataaccggtttaagagtggtttcagttctggatgttgttttaaaatctgatcggtagccactagactggcatcgtatggtgggaaaaagtgccggtcatcctttaagaccttcaggttgtaactcttaatccgcccatcagtcgaataccctaaaacgacgtccattttaccggccgcaagtgcgctatagactaagccaatttgcattggcgctaccttcttaaaatcgtagccgtaagtttgcttgaattcttggtagccatccccttcatggttgacccacaccgagtcaacgccagcggttaattgcttagccacccggcccaaatcgctgaccgtttcaagatggtattttttagccatttgctgcgtcaccatgaaggcgtacgtatcggcaaagccatacgttggaaaccacgtttgttggtaacggtctttaaattcgcgcttcacaattgtttgcgcctttttgggatccttcgttggtttcatttttaacgtcccagtgatctcggttcctgcataacgactcgttgcaatatccgcatcgccgcggattaacgattcgtgcgtcaccgttgaagaacccaggttattaaccaattcgaccttgttatccgtttcatgcgcaatcaattgactgacgatattggctaaaatttgggattccgtcgtactttgggaactaatccgaatcgtgtccttcgccgagccaccaagaccgggcaacccgcaactgcctaatagcaaaaggcagccaccaagcagcgttaagactgtgattttctttaatcttttcaacatagcgacctcctttagcgaatggcaacgggtgtcattcttttttcaagacgaccaagtaagaaatcaaccaacaaggctaaaatcgtcaccggaattgtcccgccgatgattaagtctggcttaaataggtttaagccattgaagatgaaatcgccgaggccaccggcaccaatatatgacgctagtgtcgcccaagcgatgacgtaaaccgccgataaccgaataccggacatgatgactggcattgccatcgggacttccacttgcatgattgattggagtggcgtcatccccatccctttagcactatcttttaacaccggatcgacatcgttcatgccaatataggtattgcgtaaaatcggtaataacgaatagataaacaaggccacaatcgctggtactttcccaatcccgagtaacggaatcattaacgctaacagcgccaaagacggcaccgtctggagcatgctagctatcgcaatcacgactttagccgtcttcggaacacgcgttaaggcaatcccgagcggtactgcaactaatgcccctaacaataacgcgatggccgagatgtaaagttgctcccacgttttaattagcaagtcggccccattttgatttaaaaaattaagcattgctctggcctcctttagtctgttgcattgtctggctcgtcatcgccccaaacggcgtcgtaaacgacatcgacaagcgctgtccgcgtaacaatccccactaaacgatggtcatcatcgacaacaggcacgtacttccaaccacgcttcaatatccgttcgattgtatcgcggaccagatcggtttgattcacaaagttgaccttcgtcgacatgatatcttgaacggtaccagcatctttgtaatgatggtcaatattttccaaatccactaacccttgaagcaattgttggtcgtcaacgactaacaacgtatcaacccgtcgttgccgcattaatttaatcgcagaactcagtgattgatctggcgtaatcgtgaccggtgtcttcagcataatttgcccaacagtttcgacatttggtttagcttccaataaccgatcgtgaccgattaagtccttaacaaaatcgttggctggttgtcgtaaaatctcattaggcgtgccatattgaatgattttgccaccatccataatcgcaattcgtgatgataatttgagtgcttcgtccatatcatgggttacaaaaatcactgttttccccatttcaacttggagttgtttaacaagatcttggagtgcttctcgtgtaatcggatcaagtgcgccaaatggttcgtccattaaaataatatcctgcccagcagccaacgctcggataacaccgattcgctgttgttgaccacctgataattgacttgggtaacgatctaaaaaatcagcaggtaattctaccagttttaataattcctgtgcctttttttcacggtcttcatcggaccattttaatagtttaggcacgattgtaatattgtcacgaattgtcatatggggcatcaatccgatattttgaatgacatagccaattttgcgccgtagtttaacgggatccgtgtccgctaacgatttgccagccagtgtaattgtgccgtgagtgggattaatcatccggttaatcatgcgcattgtcgttgttttgccggaaccagacgtgccaattaggcaaatgaattcaccttgatcaactgtgaagctaatgtcatcaacggccttattaccaccgcgataaatctttgaaacatggtcaaattctagataatgtgccatcagtaacctcctaataaatgtcattgcataaatttatttatattattcatgttaagaagataaacaacaagtgtcaattgataaggcttacaaccaagcgcttattctgctaaaaatcagattttagactatcgactgcgaatcgtttgttcaatagtggtcaaatcaatcagataagcttttgcgaatacctaatctcctgaaaaaaaggcgccaataagttagttcttaatacctaacttattggcgccctttaattaatttttagtcgttaatttcggttagttcccgctaaatgtgctgaaaaacgttgatttaaatctgccgcatgtgcttcatcaggactgataaccacaattgtatcatgcccagcaagcgtcccaacaacatcctcataccctaagtcgtcgattaacgctgctagtagattaccgttactaggcacggttttaatcacgttcatcacctgaacctgcgtaatcgtcaaggcgacttcacgtaacttatcgtttaaccgttgttcttgcgtccgttcatcgtcatgaaaaaccgtgtaccgcaattccccgttcacatcccgggccttaacaatttgcatttcacgaatatcacgtgaaattgtcgcttgcgtagcgtcaataccatcatctcttaacgttgttaataattcttcttgggttgttatcacttgttgattaataatctgttcaatacgtgtctgtcgatctacctttttcatcatgatcactcctccgatgaatctgattatccctattataccagttttggcggctaacaaacagcgctatcattttcaaatctgatatcgggcgtcaatcatttttgctcaccgaatcacatttattgacttattaatttcaattatttatgattattataagatataagatcaaccaaggaggctatgctgatgaagacccccgtttcgtatctcttattattaagtctatcgactgcactactatctcctattcatgttagtcgtgctgagaaatcagcatcagccccaccaagtgaatcccaatcttcagtcctcgttgaaccagacgatccaagcaatatacaatccgctgaatcgtcatccgtctcaacaactgaagaatcagcaaaatctgaatcagaaccgattaaaacaccgccgcaagagccagttgaaccaatcaaaccacttgtgacacaaaatcctggtgtcaaagccggtctcacgcccgttgcgaatgcagccgaattaaaagcggctttagaaaatggcgaaagcgtccaactaacagctgatatcacattgaatgtgctcgaaagcttgcttgctagaattcaaatcggtaaaaataaccctcaagacattaccatcgatggcaccaatccaacgaccggacagcgccatttattaaatattgctgatattgctgtcctagcaccaacaacacaactgtacatcggctcaactggtatgcaaaagaaaacaatcaaatttacaaatctaagaattaataataataactactatggtctctgtcacccaacaaatgagtcttacgcaaatggtagtacgctcttgctcgaaaatgttggatacaacagtagtgcgcagtcacttcatttcatgcaggaagtgatcgcctttagtggtaacaataccattacccaaactgctggtacttggtcacaggaattggctgaaacaggccggttagactttagaggtgggacaacgactatcaatcatgccggtggcggctcttatggcctaatccgaattgatcaaaacccagctgatggtattgcccccggtattcaagtttccggtggtgcaaaagtttcaattacagccaacaacgctattttcccggcatcaggcgctggtattcctcagattaatatcgaatcaaaagggtctggttccaatttagcactcaatgctggtggtcatatcttcggtgtcactggatcaagtagctccaaagcagttgcttcagatggtggtactatcaatgtcacaaaggccaacaacttctatcaaactggtacgactaaccgcacaattgctgccactaataatggtcatgtcaatttgaaattggcaggcagtctttattattacgtacaaagtcaatcaccaatgtccgcaacccaggacagtacgatcgatattcaatcaaccactaatctctttacctcttatctacaaaaaagccccattacagcgtacaagaatagtacgataaaactcgcttctaattcagacgtcttcggtgcatatgttcaagatagtccaataagtgccactaacaatagcgaagttaacttgaacgctggtaaagatatttttgcctatatctataacccctcaagtggtaatccaatcatgcaaatgacaaccgacaccacttctaagatgaccttaaccgccaaagatgcgtttatccgtaacatccaagccaatggtcttaaattggatattggtggtcaactatcagccacttttggtcaatatttagctgtttcaggtgcgcgaccgcttatgcatgacttccgtgacaacagtattattgacctcaccatcaacggtgcgcaaaatattgccaacgggctcattccactagcgagtaccggttcttacatgaaaattggcgatgacagtcaagtcactattaataatcaaacaactactaaccaatctgtcttatttggcctcagtggtagcaacagtccggttacaattggtgattctgatgtcactatcaacaacaatgcagttgcggcaacccgattattagaaaatattaaacttaaccttgaaaatacaactggtcaatcaccacacaccatttatcgcggtgtcagtttaactgaaaaggaccaaaccaaaacaacttatccattcgttcacttcgatagcaccattggcaccactaacgcaacgaacagttctgacacgacttttaaaacgaaatttgaaagtctcacttctactcaaaatattgtgcaacttcatttgcacgatccactaccacctgaaatcatcacccttatcaacactggtggactccctaccgatgatgcccagaaatttaaatttgctttaaatgggaccgcgactcctgctagtgagctcacgctgaactttctaagcgccgcgggacaatcattattaaaaggccctgctaaagcagcggctgccaaccaggctttcgactatcaatttgaatctgatttaccaacgcaacccaatcagatcgttgttgaagctaactacccagcaccatacgcgctcacaacgcctgtccggaaggttctaaaggatattcctgctggtaagctaggctttctagcagcaccgactcacctcgattttggcagtctcccgcttaccaatagtcaaagtcctctctacccctatactaagacagcagataccagtctgattgtctctgatccacgcgccactacccggggagactgggctattcagatcaatctcaagcaaccttttaccgctggtcaagccacactcgataatgccctaatttggcgtaagaatcagaccactaaaccattggttgccgggcaaccgcaacaactctattccaaggccgctcatgcaccgattcaacccggtgctgacgaaacggatttgacggatttactccacgaaactgttcaaacccaatttccagctggtcctaaacaaaccgcaaccccgtatacggctgaattagaattaatgctcatcactgcccccaattaaatcgttaggaggttagaggcgatgtataaacgctattttttcacttttctgttaggtggtagtctattattcacaccgattcgagcagaggctgtgcccgctagttcgagtgcaacaattcaatttagcaatcagcaaacgctaccggtcgtccccctaccacgaccacctttgattgccgcacccgacaatgcgggcaccattcacaacgaatggcacatgacaccactcgaatatgcaccaccattaacacaacggttaccacaaaccagtattaccgatatacgctattatcaacttagcggattgctcctattattaaccactattctactcattaagaaagaggcgacctactatgaaaaaaacaatgattagcacaactttattctcactactcgcaacaacaactcttctgtcagcaggccaaatccaagcagctcctacggaagttgaaaaacaaacgactgatgcagcggttgtcttcactgaaaaaagtaatccattagtgattaccgctgttccagactttcattttggctcccatgaaatcgatcgttcggctgacaaagatttagcagcggtggaaagtggctctcacattggcacagcaaacacgcttgccactagtaatgttgtttcaattcaagatgatcgtagccaagctaaattagacggttgggacctacaagtggcccaaacagatttcgctaacgctggcactactgacgcaagtgacgcagatgcttccgatgtcttaactggcgttaacatttggtttaaaacaccaaacgtcacaattgatggtgctaacaagggcgatgctgccttaccaacgactagcgatcaaacggttcaagttaacgaccaagcaagtacctttatgaaaggtggcgcgacatccttcgggagcgttgcagcaaccctaggcacggcaccaacatcaggaacagatagtgatgctatcttcctccacgtaccaaaaactgttaatccaactgacaaagcacattaccaatcagatatcacatggactttaatcgctagcccaaatagctaacaaaggagtttttgaatatgcggacaacaattaaaagactagttatcggcctattatttggcctaattgccctcttcgcccacgcgcaagccactcaagccgcgcaacccgtagcagattttgcgatgacaattattccgcctgacaatcaggccgacaaacaattaagttattttgatttagttgtccaacccaagcaacaacaagatctccagattaaattagttaatcataaggacaaaccaattaaggttcgtgtgcaaactaacacggcgactaccaatgttaacggcgtcgtcaattatagcgataacgtgaatcaatcggataaaacactcaaatatccgttgggcaaacatttaaaaccggccaaaaagaacattacgttaaccgctcatgaacaaaaagtcgtcaatattcgcttaagcgcacctgataaagcttttaaaggccaattagttggtgggattagcgcgactgaagtcccaacaacagcaaaaacaacacagcagattagcgtgcgtaataagtttgcgtatgcagttgcagtagttgcccgcagcaatgaccaaagtgtcacaccagaattcaaactcggtgctgtcaaaactggtcaacatatggggaccaaccaaatcattgccaatattcgtaatgtacaacctaagttccagaatcaaacctcattaaacgcctttgtcaccaagcgtaaccaaaagacgaagctttatcaaactgagaaaaagcaagtccaatttgcaccaaactcggttatgcagttctatctaccgcttaatgatcggtttaaaccaggccgttacacgcttgatttaacagtccgttcagaaggtcgtacctggcacttcacacgtcactttacaatcagccgccaagcagcagcggctaagtggaaccaacaagatgtcagcttgacgcctgagacagactactggccttacatcttggcaggtttaacacttattctactgattctggcttacgtctactggcgttaccgaaagaaacaaaaagaaaatcaggcgctcaaagacgaaattgatcgcttaaaatcttaaccaaacaaaaaaagagttacgcttaaagtaactctttttttgtcggtttaaaccgttaattcaattaaattctgttctggatcttgaacgactgcctcgtaataaccatcacctgttactcgtggaccatttagcaatggtaagccttgtgcttgaaacttagtcactaatttgatcaaccgcagtttcactgccaacagccatcgctaagtgcgcaaattggcccctagttgctaagccggctagttcactatcttggtgcataatttctaaacgcacaccatctgcaaaagttaaaaagtatgattggaatccttttttgtgattctcatacaactcacccgcagtcgcttgaaacatcgtttgataaaaagccttcattgcttctaaatcgtgaacccataaaccgacatgttcaatatgcattaaattactcctcacttatgtttgataattctattatgacattgatttaaaacggttacaacgatagtataaaaaaagggcatctcagtaatgagatgccctttcttaacatgcttttcaagcaaaatttctgcgcttagctacgtattgcaaacaatcggttacaccgattattcacaacactaggctaatgctcaaaatctaaccaagcttgtacgcattcatcgggcttttcgaaccagtcttttccggttaactacaaaacaggcgtcacggtgaaaatcaccgtaacgcctgtttttaggttaatcctcaaagcctaaacggctcgaacgcacctattattttttgatattgtagaatgagttgatacctttgtatgaagctgtatcacctaattgttcttcaatacgcattaattggttgtacttagctaaacgatcagtacggctcattgaacctgtcttgatttggccagcgtttgtagcaacaactaagtcagcgattgttgtatcttcagtttcacctgaacgatgtgaaacaacagctgtgtagccagcttctttagccatttcgattgcttctaatgattctgttaatgtaccgatttggttaactttaacaagaattgagttagcagcgcccatcttgatacctttacgtaggtaatcagtgtttgttacgaagaagtcatcaccaacaagttgaactttttcgccaagtactttagtgattgatgcccagtcttcccagttgttttcatcgataggatcttcgattgaaatgattgggtatttagcaactaagccttcaaggtatttaacgaattcaggtgttgtgaattcttcaccagttgaccaacgtaatttgtatgtcttatcttcgttgttccataattctgatgaagcaacatcgatagcgattgagatatcttcgccagctttgtaaccagctttttcgatagctttgatcaagtattgtaaaggttcttcgttgtttgcgaagtcaggtgcgaaaccaccttcatcaccaacagaagtaactttaccgtcagctgataaaagactcttcaatgcttggaaagtttctgaacccatacggatagcttcgcgtacagatttagcaccaacaggcatgatcatgaattcttggaaatcaactttgttatctgagtgagcaccaccattgataacgttcatcattggtgttggtaatacgtgagcgttagggccgcctaagtattcgtacaatggtaagcctaattcgtcagcagcagcacgtgcagcagccaatgaaacgcctaagattgcgttagcgcctaatttacctttgttttcagtaccgtctaacttgatcattgcagcatcgataccgcgttggtcagttgtgtcgaaacctacgatttctttagcaagagggccatttacgttttcaacagcctttaatacacccttgccaccaaaacgtgatttgtcgccgtcacgtaattcaacagcttcatgttcaccagttgaagcacctgaaggaacgattgcgcgaccaaagccgccatcttcagtataaacttcaacttcgacagtaggattaccacgtgagtctaagacttcgcggcctaaaatatcagtaataattgacatgtaattttctccttttttggctgatgatattcatcagcacttttttggatgtcaggcaaagcccacatcttattttagctaatttttagtgattcgtaaatacatacgagcgaaaaattagtcgttaaagtgaacaagatctaagaatgaagcaggttccatgcttgcgccaccaactaaaccaccatcgatgtcttctttgcccatgatttctttaacgtttgcaggtttaactgaaccaccatattggatacgaactttgtcagcaactgtttggtcgtataacttagcaactgtttgacgaacaacagcacagatttcttgtgcttggtcagcagaagcagttttaccagtaccgattgcccagattggttcgtaagcaataaccattgagctaacttggtcagctgaaaggcctttaagaccttctgttacttggtttgaaacccattcttcagctttgccagcttcacgagtttctaatgattcaccacaacagaagataggtgtcatgttgtttttgaagattgcgtgtgcttttttgttgatatcttcatcagtttcgtggaagtaatcacgacgttctgaatgaccgatgatgacgtaatcaacacccatttcattcaaagtttttggtgaagtttcgccagtgaatgcaccagcttcttcgaagtaacagttttcagcagcaacttttaagtctgtgcctttagctgcttctaataaagcaggtaagtcaacagcaggtgcaccgataactgattctgtttgatcaaacttaggtaagttggctttgatagcattaacgaactcagttgtttgagttgggttcatgttcattttccagttaccagcaatgattggtttacgcatgagaaaatctcctcttaatttaaaattatttgtctgaaatagcagcgataccaggtaatgtcttaccttctaggtattcaagtgatgcgccaccaccagtagaaatatgtgttaacttgtcgccaacgcctaatttcttaactgcggctgttgaatcgccaccaccgacgattgttgtagcacctgataagttacctaagaattcgccaattgccaatgtacctttagcaaagttgtccatttcgaacacacccatagggccgttccaaacaacagtcttagcatctttaagaacattttcgaagtcagcgattgctttaggtccgatatctaatgccatgtagccatcaggaatgttaccttcaacagtttctgtcttagcatcgtttgagaatgcgtctgcaacaacgttatcaacaggcaatactaatttgtcgccagctttttcgattaattctttagctaattcgatcttatcttcttcaactaatgagttaccaattgataaacctttagcagcgtagaaagtataagtcataccaccaccaacaataactttgtcagctttagctaataaatgttcgataacaccgatcttgtcagaaacctttgcgccacctaagatagcaacaaatggacgttctggtgcgtcaactgcttcgcccaagaatttgatttctttttctaataagtaaccagcaactgcaggtttgttattagctttcatagctgttgcaatcccaacgtttgatgcgtgagcacggtgagctgtaccgaaagcgtcgttgacgaacatgtcgcctaatgatgcccagtattcgcccaacttaggatcgtttttactttcgcgtttgccaaagtcgttgtcgatatcttggaaacgagtgttttccatcactaatacttgaccatcagtcatagcatcgatagcagtttctaattcttgaccttcgtttgaagcaacgaaagtaacgtctttgtttaataattcgccaagacgtgcagcaactggtttcaatgtcaattctttcttgtcttcgtcactcttgatacggcccaagtgagaaagtaagatagccttgccaccattgtcgatgatgtattggattgttggtaaagcagctacgatacggttatcgtcaccgataacgccgcctttgattggtacattaaagtcaacacgtactaagacttttttgcctttaatatcttttaaatctgcaactgtttgttttgccatgtggacaaacctcctagattttcataaaaaaagacggaaggagtttacctcctcccgccttataaaatgctatcgcatttctaagttcacaaaagtgaaattagattaagctagcaaatttttctaatgtacggatcatttgagctgtaaagcctgattcgttgtcataccaagcaacaactttaacaacttggccttcaccactaccaacaacttgtgtttgagtaggatcaaatactgaaccaaattctgtaccgatgatatctgatgaaacgatttcgtcagcgttgtaaccgaatgattggttgccttctgtaactttcttaacagcagcgttaacttcgtcagctgtaacttctttgtcaagagttgcaactaattctgttaatgaaccagtgataactggaacacgttgtgcatgtccgtcaagtttaccctttaattcaggaacaactaagccaagagctttagcagcaccagttgaatgagggatgatgttagcagcagcagcacgtgcagcacgtacgtttccaccacgatcaggaccatcttgtaatttttgtgtagctgtgtaagcatgaacagttgtcattgtaccagctttgattgtgaaagcatcgttaactgctttagctaaaggtgctaaacagtttgttgtacatgaagcagctgagatgatgttgtcgtcagctgtgatagtgtcatcattaacgccgtaaacaactgtcttaacagcgccagcaggagctgagataagaacttttttagcaccagcatcaagatgagcttgtgatttttcttctgatgtgtagaaaccagtactttcaagtactaagtcaacgccatcattcttaacccaaggaatattacgtgcatctgattcagcataaactggaatgttcttgccatcgataacgatgctgttttctgtagctgatacttcgtgatcgaattgaccatgagctgtatcatactttaataagtgtgctaacatgtctggtgatgttaaatcattgatagcaacaacttccaaaacgtcactgcttgttgcgtaaatacgacgtaaagctaaacgaccaatacgtccgaaaccattaatccctacttttgtagtcataatagaatttcctcctttaggaaatgaaaatttttattttaaagggttgccccttgtaaaatcgagtttgcggcaccttcatccgtgattaaccacgtctgttgaggtgcgaggtgcatgtacgcttcaattgcttgggccttagaagtcccacctgcaaccgcgagtacacacggaatattcaataagtcacgaatctgtaatccaattcgcggaatcttgtacaccacttcgccttgagcgttaaagaagtaaccaaaggcttcacccaccgcgtgcttttctttcagcatcttgatggtttcaaccggcatgtcacgacgttcggccatcgtaatggcttcgccaatactatgcaacacgccacgactgcgttcaatcagttttaatacttcttgaacacttggttcttctaataatggggcatacgttttctcactcacctgttcagggacatataatgcccggtgcttaccaccagtttggttggccatctcggcacaaaccgcattcgcctgaatatcaacactctcaccaatcccacctctagccggcacaaagattaaattgcgctttttagaaagatcagttgacagttcatgagctgccttagccatcgtcgtgccacccattaccgccacaacactttgtccttgtggtagtaataactgtaacgtactgttgactaatttgcccatttcggtgaggacttttggttgttcatcactattgccagaaacaattaagcaatgctcaattccaaggtagcgactcaactctcgttcagtctgccgtaatcctaagaactggtccattacttgtcttagctgatcaagaacttcttgtcctttgacagttaaaaccatacctgattttgacgaatttagcaaaccttgtgcctttaaaaaatccgtctccgtccgaatgactctttcactcaatttgagttgctcagcgagtgtgcgccgaccaaccggtgcaagccaatcaatatgttgtaggacttggtaacgtttcttaacgacaccgacaaaatcaggcgcaaccgcttctattgcagataactcatcgcgcattgctctcgcctactttccggtgggacataaaatgtccatctgtgtcatcaatcgacccatgtctggcaaaaaataaaaggcaacttactaaaactagtaacttatcctttgaacaagaccattatatcaagtgagtaaaatacatgcaatgctttacgcttaatgaatacgttttctttccgaataattttaaaacgttgatttatcgcgatttattaaaattgggacttgaattttttttagatatccgctaaaataatatattgtactgttgagtacacatgttaggttgcgccgctagtgtaatggatagcacccaagattccggttcttgagatccgggttcgactcccgggtggcgcatatatataccttttgtactaggctttgtaagtcctccgtgcagattggtgcagaaaaagtataaaactcgtcattaagttgacgggtttttatttgcctttaagtagctgtccggttcgttctgcacccaactataaattaatttatataatagaagaaatcaaaaatgccatcctaaattagggtggcatttttatttatctctgaattgcaacattccggccacctaccattaagcaaccacattcgaccatttcattcatctggttatccagttgaaccatcacgtcatgaatggttctcaaatctgctgttggatcatggcgacagatgaacaagggcaaatcatttcgcgtatagtagtaactcatactacccaccacgccgattctttccttatataggtcgacatttccggttgggttcaaaactaaagaatactgatcgttaattcgtgctggttcaaactgcttcattcaattcgctcccgacttcttaataagtaaaactattttttctaatactccttttctaatttagataagcctttgtaatttgaaaaaagctgtaaattttcatcatgaaattccattccttttttagctaatagttcacagagttcctcaacgttaataattaattctaattttgccttacctccgttctgaatttctgcaagctgacttgtgggtaagcgagtaccattctcgtttggaatacctaatacaagttcaaaatcaacagaatcgtccttaaatttcttttgcagatcatctgaagttatttcaccttcatgcaaaaactgacaccgcaacttataaataatgtctgcgtcaaaatcaggttttatctgtggaaatctttctccattggggtattcattccattccaatttacttgtagccgacattataaaatttttgtaccaattttgatatctttgtccatttcctatatctccatattctagttttccacaaatatcaggtattgttaacgccataccaagagcggcgatgtaatttttattatttaatcccaaattaattgaatctataatctcttggaaattatcttttttactttgtttacccattccaaacatttttaattccccctaaacttttaaatatatatatattataacgtataacattaaataaactactaagctataataggtgatattacattaaacatatacggagtgattaaatgaatccatatcgttggtacttaaataataaagacccgctagatttcttatcttttatcgttaaagtgatccttttctttttaatactatggatttcattttttaaaaactacacctactatgaagatataagcataaatcactatccaatcaatacggcccccttgtataagaatatttctgatgatatcaccctaaatgggacagaagatgcaaataaagttctgtacatatcgcccgaaacgacacctgtgaaactaacgattgagaaatataatccctcacctattcctactggaagttataagccagttaaatctataaaaccggtaactattgaccctgggacatcttataaaattacttacttcgaaacagataccatccctgaatatcaacttaaacttgaaactgatactggtaagtcaacagtttctatggcttttaatggtaaataccaagtaaatgatagataccgaattaaagcaaaactaaagcttgtaccatttttgattaataggttcactaattaatatgtacgccctcattccgagggctttttttaatatgttaatgtttgtcctgggtagatcattgcgttaatgctcttgccgtttttagctgctagcgtgtacatattgactcctagtttgttagcaattaaccagaatgagtcgccgtagcggactgtgtatgtgcggttagttgatgctacaccggataccttaacagtttggcccggataaagcattgtataaattgtcttgccgtttaatgcggccagattatacatgctcatgccatgacggttggcgattgaccaccagctgtcacctgattggactgtataagttgaaccggacgttgtgttaccagtgttagtgctgataatttcaacgtcctttttgttggcccagctcatgacgccgtttaataacacgcggctgccgctgacttgaagcaccttgtatgattggcccttgataaaggttgggattgcttcgccagtcgcccagcgttgtgctgagaagttaaccttgaccgtattaccggctttgatttctttcttggccgtgtcgtccgcctcttgacctgcatcggtggctggtgtttcagtcactggatcatcgtgtttcgtataaccattatcagtgattccggttaaatcgatgttaccgtccaaaccgccatagatataggttgatgtgaattggaagatagcgatacctgtgcgagatgggaaaaagttataattaggtttcggtgttacagcatagttgggatattcggctaaccatagtttgctgccgaatttagaaacgacttgatcaacgtttaaatggttttgcaggtaatcccgaccaccgtataacatcggcgtataaccggcgtttttgattcgttgcatagcatacataattaaatcagtattaacggcgtacgttgacgcgccttgctctaaatcgatggcgaggattgaaccttttggcgtttgcattttacttaatacataattcaaagtctgatcagcagttgcccggttatggatgttttcccaccaaaaatagctgtgagcccgcctgccttgggcgatggcggattggacttgtgtcttataagtccactgctcatagaggccattggcgttgtgcccaccaatttgagcaatcgcaaacttgtctgacccgtagccgaatttaccaaactgaccttgataaacggcccaatcgacaccttggtcacctttagcggcttgtgccaatccagttgatgtctgggcaaataaaaaagccgccattccggcgactactagtttcattaatttattttttttcattagtctttcactcctttagttgttgggttaataattgtgttataaacactggctgctactgttaatagcacatatgggttggcaatcgccttgcccaatgttatccataaaatatgccagctagtaacgtcttgggctttaatcccaaaatacgcaccaaccggcatcactactgctattaaaatctgaaaccaaaaatatggatttttaaatcttacttgccagttcaatgttcgatcaactccttatcatcaattaattttaggctcttaaccttgttatataacgcttctcccgtcccgttaccgccaataccgctgtaacctttaaaaagatgctcaatattatctagctcgctaatggtgaccgaaccgcgataaatcacgctggtgcactggcgatataatgagtcatgaagtacggcttgaaccgcattatccgtcatatccatccgaccctctaagttaatcaggcgtacattgcgactcttcacaatttcagttgtcgcctttctagcccctaaataagctgacggaacggttaatagccacaaaaggagctgccctaattcttttaaactttccacttgatacacttcctaaatacataatttgaaaacaataaaaatagcaatccataataagattgccatcggtattgcgtattttaatcctttaaataatcccattaaaccgcctccgttgatttgataatgtcatcataatcagcttgagacaattgtccaaattgaacggctaactctaaataatcacgatcaagttcgccattataaaaaagaaaagcaatatattctttattcattagatttcagctcctctaattgctttttcaaatctaagttcatcttaaatagctctgcattaattttatcttgatcggttagtggacgcttcggctcttcaggtattgttgtaacataatttttattttccacaatcgcaccagatatatagatgtagtagccaggtttgaatttagatttgaaatcagccggtacaatctcgtcttctacctcaattacacatgatgcttttaaaccaatgataacgtagtctgtgatttcttttgaatcattgattgcaattttcatattaattcccccttactcattaacattaaatccgtaaatttccaacgtaaaagtattcatcttgatcggctccgaaccagtggataactgattgtatgcttcccgaatattaagcccatcaatgtaatttgaatctttttttgagctaacaaaattcaagaatatatgattaaagatattccctttatcagaagaactaatatacatcacatgcccatctcgcggatatacagttatgaaccgattataattttgataatatatgtgccagatacagtaatcaaagtcgtaataattcccttcaaaagagagcgtctctccgattgatgctgagccagaatagatattaactccggtcttgttcatccgatgagcccacttgccgtctcggacatagtattcccagtcgctttctaaaaaacgaatatacatattatttgcatctataaacgaggctaaaattgtcccttttttctgatacgacgttaaaaatggtggtgtgttagtaccgaataaatccgctgagtcatacgcatagaaaccactacgattaatctcggcaaaactcttaatgactctaggggtaaatagctgtttatcgacctgcgctaaactaaacttacctgcaattaaatcttttgccttaattgacccgtttacttcctgtaatgttgcatcttgcttactaacatatcccgcaagcgtctctttattaacgtagctttcaagttctgattttttaacaatattattatcggtaatctgtttagcaatctccttaatagcatcatccgatgtgttagccgtctcttttaaacccacaatctgatcattaagtccttgcgtctgcagtctaatactctctttaaacttttcccagtcattcataaaaggtgcggtatcaagatgcatcaaaacgttatcttttttcacatcaaaagataaatcaatactgctgattaccgttccgtcactttctttttttacaaggaagtgccctgtgactactccggcaacggcgaaaacatttgctgggaagtagaatgtgacttgcccaacggcagaaccagtagttgtcacccccgaaacgaccagcacatccccatcagcattagtctgcgcccattcgattaagtagccgtctaatgcaaacggcttaccatttgattgaaaccacactggtaacggacgtctgctatcgccttgtctggcaaataaatagtcaccaattggtttaatcgtcgcctgctgcgttgctaaatcaacgatcatataattattcatgttgttcctccttcatgatcccagcgacttcaaatagtcgatttaaattagtctcaaaaattatccatgtgttgttgatatttgatagtgcattaatcatatttaagttcgtgagactcgccttgccttcatatttgagccagtcttcaccattgaaacgttggcttaatttagaaatggtattatcaatcgaattaaaattattaaccagttcaattgcaaactcacgatttattagcttataaccacgtaaatcagtcatggtagggataggtactggatttagcccattaatcagtaagaatttatttatcaactggactgattctaaaatcatcttcatgttctgattaagattatcagcaactagtttcaaatctgatagccgctctaattcaatcttctctgcagctatagtccaatcactacttgtgtttaaattaataatttgtggtgtactgcttaacatatactcgtataactcgtgtggccctactgtcgtccatgcaaccaacttgtctgtctgccccgttcgacaataacgtagtacataatcatttttatctgtagagacacgctctttaaattcatatccgttcaaatctagtagcatattctgaaacaattgtccgactggctttagtcgcccttcatcgtacccgtagaatgactgcagtgcccaactatagtcgttgttattcattgtgaaataaacaatcttctccatgcctagcatatccaaaataaacaacatgcgcatggaataatctgcttgttcttgctcggtgtacgttccattaaagttagccggcgacggatacccgaattccgtgacagataattgttgcgcctcatcttctaatgcatcgacgaaagttagccaattaggatcggttaaaatctgttcaggtgcaccctttacataaggatggaacgatacttccttatgtccagttagcatccccttattaatcgtcgataaggcattatttaaatagcccggttcgccaatccacggatatgatcctgcaatgaaattggcgtccggatcaaacaacaataactgactataaaaataacgatgcatcatcacaatgtcgtcaatcactgtcgcggaatccttcccccaccaataatactggccaccacccgtagcttcatcaatggcctcataggttattttttgaccgcggtagtgtttaactgtctcagtaaaaatatctttatacaagctaagcgcatcttcataactaatttttccagataagtcagtcgcaatctcattgccgaaccaaacagacattatcactttaataccaagtttactgagacgatcaaccaaataatccaatcgactaaaatcatattcaccgatttgaatacctttttttaaaacggtcgcatgtgtgataggtagtcgaacccaattgactggcatctttgcaatcatttccaaatcgtagtcaatatttcccctaaactcatcatcacttgcagaccagtaaataaacccacttgtttcattaacgccaattttatcgacaagtctcgtcatttgttcacatctcctttcttcaccttaatctcaccattttccacggtaagtaaataaacagaaccgttgatcgcgtctttcatctgcagactggtcagcggttctatttttaatgcatccagcttagtcttatccgccgcactcatcagcccatcttccgttggtgttactggtttgtactccggaatttctggtatttcaggaatcttgccatcaacaaatgtttctaacccctcgactaaatccgctctggtcgtaacgtgaaaggtctggcccttcgttaaacccatttcagcgttatcatccggaaccatcaatgtgaacgctggtagtgtcgcatcccgtagcattcgcttagtattgactaccggcatcccggttaaacgtgaattaaacgctttggatgcggtttggttagcttgcttaatctccttagccgctgcctgattatgcttaatcgcttctttgactaatcgctcttgggcgatatcttcatctaaaagtgtccggactgagttgtccaattcgacttctggtttatgatcaggcgcaaagggatagtcagtgatacctgtgacttcgacgtcggtgtcgaactgttcaggttccacgcgcagataccaaacttcgccaggtaaaacttggtcgtcaccgtcataagtgagcgccattgtcgtgactggatcagcctgcattgaactcatggcgtaggcgttcatcgcatttttttcggtaaacctttcatccgaaatctcggcacctggtcgctcaccccaacgctgaatgctcgttgtattttttgctaagaatggtggaaagtaatactgattctcctcaccatctttttgcttgccgtaacacatggcgacattctgaatagaggtcgtgtcccaactgcagctgaaggttgtcgtgttatgtccgtagagatacgccttatcgacctttttctgccaggcatcccgtgagtaaattcggatgtgcttgttgtccggatagatcacgcaattaaacttatcgacacaagtgttgagcgcatcaagcgcgctagtgttgcccaagttctcaatctgaaccttgctaaaatcgccgataacttcccaagtaaagccgtaggggttgttatcaaaaaagtaatgcaagatatcttgaatgctgtaggtgatagtgccggcgcgtttttgatattgccaaatacggcgcgactcatagtaaatatgattagcggtaatggcgacttgattgctgtagccttttaaatccggcttcacttgcttaataacatactcttggccacccattaataacgagttctcgttgcgtagtatgctatacgccaatgagtcatcattcgcggcggttaattctaactgataggattgattctttttccaagtccgcttcacggaactgcggtcaaaatcgaccaaagtttcgctatactggtcggcagtatcttgaactagaatcttttgctgcttaaaatcaatcatagatacaggaatggaaaactgaaggtgatagcgatattagacaaaccagtcacgctaatatcgttccaccccttctcaagttgaatatggccgtgattagaggtgcgttcacagctcgctccgttcagtagtgggcgaaccccatgccaaatgagcgtgtcattcgctgtgagcgcacgatttaacgcaatcccataattattcgtgagattggtgattgtcggtgtgccctgacccttaataattaaatctaaatcatgccgctgataatacggatcaatcacaatatcggacggattatagactttaaatcgcgtctgttcaaagcgataatgtaaatcttcgccgttcggtaagttcatcccaatctgagccaactcatcttcatagataaattgcatctgatcagacttggccaacgattggcgataacctgcaggcatatcaaattcaacagtgaacttcatgtcgccccaattaaggcgcgttgtttcaaatggtttggcaatcaccaacatcttaatccctggcatacgcgaccaccgcaattcaatcagattgcgtgaataaagccggcgccaaatttcttggctggccaattcgaaatcataaagatcagtcgcttcaaaataaaagtcggcagcaacagttcgagccccaaataagatgggaccttgctgtctactaccgtcttgaaaatcattcgtttgtaagttagttctagtctgtggcgctgtggttcttaattctaaaaagtgaagaccattcatttcatcaaattcaaaatttcgaccatcaactttggcaaataattttggttttgaaaaatccaatgacatccctcctatccgttgttataacgcaacatgtttttgctttgcgcattcgttttattaatcatctgagctagttgtttcaaatcaaggctactattattaggttcctgactagttagcacattgagcagcgtgtgcataatatccagttgtgattgttgaattttaatctgaacttcttgattgcggactacctcatcattgttgccaccactaatattaatcgtctgattggttaatgctgattgcgcctgattaatgtttttgagaatctgcgcatcagcgggaatcccggcagtcccattggcgaactgcggaatcccacctaataaacgattagttctagaagcggtaatcaccttcgtcccaattggttcgtctggcaaaatgacgttgcgaccttcaggaataaaactaaacccattgggccgttgaattaactcgcggaaagtaggacccttttggtcgttgaccatcataggcccaccagaatgataattggtaccacgttcattgcctttaagcttcttagtaattgtcttaaagattgatgttagtgtgactgtatgatctttttttcgactaaagatatcgaccgaattcgatgctgagcttgctgggcctgaagcattatccttcgccttcagatttttaattttaggattattccgtttaaaattatcaaccttagcattggcgtttgaaaccgcacttccaagtcctgaatcatgagccttcaagcctttacttgctggattattacccttaaacccatttacttggctattcccacgggaaacagcaccgcctagtccagcatcatggcccttcaacgctttacttggcgggttatttctcttaatgctattaacctgattattaccagcaataactgcgccagctaacccaccatcatgacctttcaaagccttgcttggtggattgttaatcttatatttatctaccaataacccggcatcaattaatttttgacgcgcatcagcattattaattaataaattcttctgtttctgcggtaaatcgttccaggcaccatattttataactaagtcggctaaagctggtgcacctttagtcgttaagatggcattcttttgtgcgtcggacaatccttgccaaacgccatatttatctaaaatgttaactaaaggtacagtagctttatctttaaccaatgcttgttgctccttgagcgatagcatattccattgtccgccttttaagagcaagttagcgatcggactagcatctccatgcaaaatggcttctttttgttgcggtgtaaattgatcccaaatgccaaattgttgaatgatgtcggccatctctttatttcctttgacggcaacgattgcttgttgttctttccacgtcaaatcatcccacttatcattagcaagtgctgcttcaccaatcatgagtttggcgttactggataagttagcatgctttaaatcgtacttcaggttagcccaacccgttttagacttggccgccttatcaacttcctcttgggcattggtcttaaccttccctgttttagggtcgaaaatcaggctgttccattgttcattcgccttagcagtagccttagacattgaattggtatcagcggcaattaaagaggtgctcttagacatcttcttagtttgaccgtcaacaatttcagcggcccgttcataggaagtctcatagacccctaaatcttgcttgatttcatctttcgatttgccattcgctcgatcaagcttcagagtcgcggcggccatgttatcgaccgaactcttatgatttgattcaagctctttcatagactttttataggtatcggcagaaatagcgccgtccttataagctttcttaattgatgtagattggttttcataaatctttttctctttagtgtactgttcagataaatcttgaatgtcttgctcacgatgttggcgtgataacttagacacatcaccgtttaaagtctcaagtacaacctttttggctttgccaccgatttgaagcagcttcaattcatcagcggtgattcttgttctagcatttaaaacaatctgcttttcgtcggctgataatgatgagacatccccattatgctgttttagaatagactgcactatcttgttttgactctttgcatcagcgacgactttagagtttgtcttcttcttagaagctaaatctttttcagctgcttcttgtgcaaacttcggtagatcatcaatgtcgtcttgcatttttttgaaagaatttttggagtctgattcaagttgcttaaacatcccgttaaagttagcagctactgccttagttgaagactgcgatttgcttgcaaatccctctaattgattttgaacgtcagacgagaagttttgcattttagataacgattgatcagcagccgcaccgacgtcagtcccccaacgtgcagttcgatcagctgattcaaccgcactctttccccatagttcccacgcggcgacgccaagaccgacaacagcagtcgttccaagaatggctaagccaaccggacccattgcagctaccagaccagtacttgcttcaccagcacttcccatcttaaaggctaataattctgccccttgtgacgcctctaaagttgcgggtcccattttagagagaccgcctgcagctgtcattgaatcagcaccgacttttccaagtaatgatgatgtcatttctgcagcggcttgtccaccacgaatattaccgactaaatcgacaaagccccggcctaaagtcccaacacttgtcgttaatttaccgacaatgcctaatacgggaccaccagcaactgccaataatcccatgttaataatcatactttgtgtcttaggatctgcatctgagaatgctttagctaaacgttccaccgtattaattgctggttcagccgcatcaatcgcatcactgaaggcggacatcaatggcccaccaaccgtaatcccaacgtcggttagtttattcttaacaatttggagctttgattcaaacgttgcgtagcgtttttcagcttcctgtgttaaggcggtgttttctttccaaccatcgcctgaaatcttcaaggatttggatagcgtgtcaccagcacctgataaacgcaacatggtatcaagctcttgagtggagctgattcccattgctttaagcattgatgtgacatctttaccgctatccttagccttgccgagtcccttaacgaagctgacgattgcttgtgacgcatcatctttccatgctttctggaattccttagatgacattcctgaaacgctagcaaacttacttaacgatttattgccactcatgactgaagtattaatcttttgcataacccgtgacattgaaccgccaccggcttcagcgttaatcccaaccgaactcatggcggcggctaaccctgtaatctgcgcttcagtcatgcccacttgatgaccggaaccggccaagcgaagtgacatttcaacgatatccgattcggtggtggccatgttattaccaaggttaacgatggatgaccctagacgatcaaagttcttttgtggcatccctgtgatgttggccagcttagcaagtgccaccgaagcatcttcagatgacatattagtggccttgcccatcgcgaccattgttttcgtaaaagagaggacattttgggtcttaatccctaattgaccagccgcttcagcaacgtgtgaaatttcagtggtgctgaccggaattgatttggccatgctccggattccattttctaaatccttataagagataatcgtcttaccattagaatccttagcttcatcgactgtctttttgacaccagtaaatgctgaatcaaaatcactagctgctttgactgaaccgagcattgccgcaccaagtggaatcgaaacatacttcgaggcagcagcgcccatagagctcatggtcttaccatttttaaccgcagcggccgacatcttattgagatgaccagtccaaccttgcgttctagtttcagtaatcgtcatttggcgggcgttgttgatcaactgcgaattaagaccagcaactttagcatttgcattttgaagttgcgttgctaacttcgcggtttgagcagtcggttttccattaacaaaagagccttcataagccttctttagctcagcaacttcccgcttttgagctgctaacactttagttaaaccagtttgcttggcgcccagtttatctagcgcattacccgtctgacctaaaacagccatgtttgatttcatttctgacatagcatatttggtttctttacggacaccggccaagcctttgccaaacgatgaactgtccaaaccaagctcgattatcatttggcctaatggttctgccataatttaatttcctcctttctataaagatttgatgaagtcttccaatggaacaacttcctgattagctgactgtggtgctgactgatcagttgcttcatcagctgaagtcattgcgattaagatatcccaatctgtctccagtacgtcattgatattaaagccgtacgcattaacaacttttttgacgtaggcaattattcgttgtttgacttcgtctctggagactcgctctccagaatcacttttgggtcataacccatcaattgggccatgaccccttgcataaagttatccaagtcccaagaatcgataccttctaaaatcgcttcgcgtgatacacgttcgtctttaaatagtccggcaatgaagtctaattcgatttcgtagaattcccgtgatgatgcatctggatattgttctggtactaaatccatcatttctaaccgtttgccggctgtgatgtgtttctcctcgaatgtatgaagcttaccgtctttaccacgtaattgaatttgtactgacataatatgttcctcctaataatttttcgtctcacgtttctcgtctctgttacaaaataaaaagcagattagaattaatctgctgctaccactgttacttctacggttcctgttttgttgccatcggttgtggtaccggtaatcgtcaccttaccaggtgcaactgctgtccctttgcccgcaactggtgtgattgtcgcaatctttgaatcggaagatgccaacgtgtaggttgaatccgtcgcattacttggcgttacagttgttttgattgtgaaggtttcaccgactttcacttcctttggagtaacttctaaagtgatgcctgcaactggcacagttgtcgttgattcagtcccaaaagtttggtccatgagggccttaattgattctggttttgaaccgaagtacttaccaatgtattggccattttgtggtcctgccttttgatcagatacagctgagaatgaatatgattcttcttcaggttcaaatgctttatctacttcttcagtcttcagagaaattttttctttggtgaacgtaccgctaaatactgataacaatgcaatttcgccttgtaggttttctgattccatcattaccgaacagaatggtgcttccgtgtcgttaccgatgtatgaaatttctgtatcattatcaaccttgtatcctaagacaatatcagattctttttctgggaaatccaaaataccaaagtcaattttgacatcgccaacaccttttcgtgatgtgtaatatgcaatgtttgatccagatacttttactgaatccttagcgagtcctgaaatttcagcagtcttggtagcacctttgtccttatcaccttgtacaacgatttgtgggcataaaggcttcccgtctttgctccatggttgaactcttaatcgtttatatcctactaatgtcatgtgtgttcctcctaatattctgtatcgtaaagttttgatgtgccgcgataacggcgggcatctacatatctttttgtttctgggaagtactcgtctaagccgcccgatagttgaacaaaccctagcgtgctcattaccttgcgaatctcaaactgcgctagttttaactcaacgcggtcaggtgattggacatcaacctgcagcgtgaattcttgggctagttcaatatcactcccaccgattactgggcgtggtggttcaatatactgcaataaaataaacagccgatcgtgatcagctgtttctgagtaatcataaaatttaatacggtaatcactgccgtcatcattagcggttaattgcttaatcgtctgattctttagcagctggtcataaacgatgcggagcatgtctttgacttctggcattaattcaccaactttctaagctgattttggcccaactctttagcctgaaccttattactgtcgtaggccttttgaatcttgccaatcccacgtgggcggtatgtgcgaccgctacgggtatagccaaattcattcaaatggactaagcgccaacgttgtcgactccccatgccatcccagccgattttaacggtaagtgtgccgtcttttttgcgtggtgttgagacgacaatttcttgcacagttgcaccagtgtttcgataactggcgaccgcatttttaatctggacagctaaatagcgccccataattgtgagcgcctctttagagtaagcattaactttgcgagtgcccagttgctgatcaagtttggccagcacctcgtccatccctttaatctcaacactcattccgcacaccccagaatcatgatgataaagcggtcatctttaaaatctggtcgggtgtcgataacatcccagaccttagtggcataacggctatctttaatctcgacgtggtgctgattggttggcagatattgcccgcgggtgtctcggattttaatggtgactgccagcttggtttcgtgtgactgcaaaatctcacggtccttcatcgaagggtcgtaaacttcagcgttgcatcgatagagttcacgtttcatttcctcgccgggttctggcccgtcacgaggtacgaattgataaaaaatgaccgggacatttaagtcaccggccgttgttttggggattttataatccttattcaattgatggattgtcatccgttgttgctccctcctgattatattcaaacgataaaccgatcagcgctgattcaaagttttgttcaaaaaattcgagttgctcattgtactcatacctgacccgattaatgaccaattcaacaaattccggattggtatcatcatcaacgccagtcattcgtttgatggcagctcttgaagtttgaatcgatttgatcaactgctggtcttcactgttgtgcgaaaaattaaagtcggaccgaaaacggtcaatccattcctggtctgtcatttaatcaccttattccgtctttggtaataatgctaataaatcagcttttttagcgtttggatcgaattcgataccggcttcagttaatttggctttgatttcatcgacttttaaagtactgggatcaacagattcaccagttacttcttcatctgggttgatgttagcgtattgcgtttcttttccatcaccgccatcttcgccggggtcagttgttgcagtatcagttttcaaatcataaacttgagcagcattattgtcggctgctttaccaaagaagaattgtttagcggtgtagagcgttgcatcttcgagagctaacgtttgatcaaatggtttaatcgtcagtggtccagctgagaaagcatcgtatcgacccataacgaacgcaattactttaccttcagcaacggcaactgattcacatgtttgtaaaccatatggcaaagcattaacccattggccatttacattttgcatggtcatcgcagcttcaaagtcgattgatgaaccaggtgcggttactaatacaattttgccacgagctacaattggcttgccattttctttaacagataactttttgacgataccggctaattcttttttggcggtatttgtatctttcaaagttaaagtaccggccgaaactttttctggataaacaccaccagtaacggtcacatctttttgaacttgacgattcaagccaatgggtttatctttcccgtccccagtaagaaatgctgtttcaccagcaacagcaatagcttcagtaatttgtgttgttacgaattgcttagtccaagctggcccaaattctgccatgtcatttggtaggacaacaaagacagttaacttactttgatcaccagatgattctgtaaatgcagcatctagttgacccttgatatcaccaaataatttaccccatactgcggcacctttggcatcagcacgaattacctttaatttaataccggtatatgttaacccaattaattttaagaatgggtgttcagacgttaagtcttcgaatactttggtaacaattgtttctggaatgactttgtcatctttccattcgacatcagttgaaatttcattaaagaaatcaagttcagctttagtcatcttaggatcagatttttgtgcatttaataaatcgccagtcttagcttcgacctgcttagcaatttcggcctgcatgtcatcgccgagggctgccattgcatcactaaatgcttgggctttttcgccttcagttttagttgcatcagcgttaattgttgcgaaatcttttaatcgtgcttggtaattctccaagtcttttactttcattgtcattaatatgacctcctataattaaatgaggaagctcccatagatatgactcgtcttaggcacttcctctttttgcttgttattcaattcatcccattcattcaacgttttaccgtcaatgatggtggttgcttttaattcatcgattgctttttgaatcatgggttttagatctggagctgataatttaaccgttgtatttttaacatcttgcatattgcgaactttatcaatcacactcttaggtaaaagagagcttgtttcacttgctacaagacttggttcatccgaactttcaaacatcacttcatcaatgaatccgagttccttggccttatccgcagtcagataggttgtttcattcatcaagttgagcagcgtatctttatccatgcccgttttaatcatgtaggcgttggataatgcatcattagcatttttgagcatatcgctcatcttatccattgcccggtaatcaccagcagattctgcggaggcattatgaatcataatgcgtgcaaccggactcatcttaacagtatcacccgccattgcaataatagaggccgcactcgctgccatccccatcacattaacagtcactggcccagcgtaggcacgcaatgctgtataaatttcagcaccaacatctacaagtcctccaccagaattgatgttaatttcaacatctgagttatctgcaggtagattgtctaaaacatccggagcagacgttgcttccatgccaaaaaagtcatagacccatttatcatcgccccgaaccaatgggccattaattttgattgtcgtcgtcattattcttacctcccttcaatttttgataatttttagtaataatcatttcatccccaccttcaattggctcgagataaagttcatttcggacttcatttggggtgattgcaccatttgaaacagccttatcaatcttatcagcgttgcccaaaatggttggtgcattcacaccgattaagacaaagtgatcatcgtaattcttgtaatcatactcagtgatcgccttagcatctaattcagacttaaccttattaagtaaggggccaatacagttcttttcataactaatccgcgcatcagagacgtccgcaacttggccatgaattaacgctgggggaatcccgatgatattagccacttgatcaacgaatgagtctagcagcttcagtaactcatcaaatgattgactactattcttgctggtggtgttagtttcttcgacttcaatcccacttgtttcaggtacaaacgcaactgatttagttaaataagatttcaccactttatcaataaatttttgttgtttctcagtatcctgattaccttttgtttgatggattttaaacttaccgcgaatctgattattacggaggttgacttcaatcattcggcctagcatcttgccccagtcctcatagagtccgccgatatagttatctagtttcttgttgttataagttagataccaaacatcatcgtagctgaaggtgcgctgataagtgtagtcgttgatagtgaccccttcaaatgtatctgggtacaaagcgcgatgcttacgggtaaaactgtccgctactagtagctggtaatcatccgattgaactactaagacttcattatttctaatcagcttataggttaaatcttcccagaataaagcagcattttgactgctgtttggtttaacattcagccaataatcccagtcatccttttgcttagtaccatttttcatatgcctaaatactgtctgactcacggtcctggcaacataattacaacaaatatccaaggccatacgtttcaaataggcgcggttcgatgtttcttcgaacatatccaaatcatagacataactggcatcttcacgccgcgtaatccaatcccaaaaacttgccatctattcacctcccttcagtctaaaaatcaagttccgcaaaattatctaacgctcctgaaatatcgatatcctcaatctcatcaatccggtacaacgtatataaaaatgcttgaaatccatcagtttttcgtctgatatcttcctttttctcatacgttttattgccttggcggtcaattttaaccaacgtattttgagtgtaccaacgcatgatggggacatccccccagataaactggttgtgctcaaagccaagttcaacgatcggtgcaagtagtggatgaattgacgttggtcgtttaatgacatcgacttcaaaaccggcttcttcgaatttcttacgtagcgtcatcgccaaataattatcaatcacgatttttttaattagatactcatcccgttgatcaacaaaccattgcacaatccggtcaatatcaaccgtaccgtcatccatgatttctaaatcgccacgatcaacccattcagcaattggtgcaacaactttcttcaggtcgcgggcatctttacgtgagtacccgtaatacttatcgacaaacggtttcatggcgtacgaatggaaaagtgatggataggtatctttgtctttaaatgttaaggcgcagccaataaagtctcgtacactggcaaaatcgacagaaccgatacattctttgccaaccaaatcaggtagtggcaggttggtcgctttgatttgctcatatggcgcaactgatcgctctaaatcatcaagtggcaagttcattcgcttggtgacgaactcttcacggccggatggatcaatgagtaatgcatcataatcttctttgatttcttcaaataaatcgatggcatacccagttagtggcttggataacatcggattgggaagctcccaattatcagggtcatcaagctgtgattcatcatctaacttgcaaatgaacgggaacatcaaatcaggtttaacctcgccatttaggactttcatcgcaattgcttttttattgtctaagaaaccttcccggacataaccgtctgaaccaatgtagaagacacgtgagtttggctttttacctaaaccagaaatatgaacctttacgttccggttatcagggtattgatggacttcatcaaaaatgacgaaaccatcccgcaacccatctttagtattcccgtttgaggtccgatacttcagcattgaattggtagctcttgattgaataaacgtactagtggcatggaatgctcttgacagtgtgctgttacgattaataacatctcgaattcctacaacactagtcatcgcttgctcttcactattggcaatgattgaaccgttataatttcgaatgccgtttaattctgaaatcaaaaaattagcaataacttcgattaggccatttttcccagcaccacgacccattagccataaatgttctttatagtatcgacgatcgttattcttgtgatacaaaaagacaaacgcaattaataatttttgaaatggctgaatggggaaaaaccacttattaccgtaattgatacaatcgttaatctgtttttcattaaaatagagcgagtcgtctgataacacgtacttttccaagtacttaatcagcatgactcgctctttgtttaattttattttgcccgttttatagatcttgatgtagtcggtgacatattgttgcttaatcatgttaaatcaccaggactataatctttatttttatcacccgcacctggaggaggggcagacaatcctaggtctttgcttaaattaatcagctgcgcgttgatacgattcttttcagcaatggccggattagccttcgtaaacttttgtgcaccatttttaactgttatcattagcccgtcatctttaattgatttatctaattgataaaaatatttgactaagttacaatatcgttcaactttttcaatatctacctctgatttttgattaacttttttgagcaattctcttttcataccggcttgattcatcatctacccccctttcacatgaatttttactgatttttgttgaagtcgacccctaccaccggttcccagttcgagtttttaaggcgatttatttagcccgggggtcgttctattcaaaaaatattctttgtaatgtcgaatcaactgaaattgtgtgcattataggcatatgattacgctttgtctctgagtcaaggtagatggttgctgccatgactcttgtgcctggtcctttatcatcggttgttacccattgtgttgaacaactaacgacccatgccttctcgcccttaatataaatctctggcacatcatggtcgctaatgattctgtacttcacatcatccattgttaatcccatcgttcatcatccttccatttgttttctttctttggcccacgacttgcatagttaaagcgatggtgccgcttgttgtgacagtccttgcataaggttcttaggttgtctaagtcgagcgcaaactctggatagaactccagctctttaatgtggtcgacttcaaggactgttgattgctgtccagtcacaaggccagctgctttgcaccacagacattcatagtgatcgcgttcaagtgcagcagcacgaagctcacgccatggttgtgagttgtagaagtgagtacgtgcttcacgagttgatgtatctaacatcgctaattaatcgaagcacctttgattgcaactctacgtaatctttgccactctcgcggactgtactgctctgaatgattcttaataatgtttcgatcagaccaagttgttgtcttcctcaatgatgccgtaaagtaacatacgccgtgtgcatataacattggtgactgatctaagtaattaaacccgcgtttgattctatgtttcatcatcttcaccccttaattgattgcacaaaaataagccagctgttaggctgacttatatattaataatttctttatctgtctctaataggttcaatccaactgtttctgtcggagcgcttggattgaattctttaaaggcgctactttcttttttcgtatctccttcatatacatttaaattttcaatattgttaaaagctttagtttttgtatcatatctataaaatagttttattttttcatgaaactctgttagaaaatataattcaacactttgtagattgtcaaattcccctaaactaccaatgtagaaataagcttgttcgaatggttctatgtctctaatatggaatttttcttcattaggttcatcgacttcgtattttaaatttatatccattgagattgcatgatgcatagaaacgttatgaacacttaaatataaattttggcctagaaaatcatggtaaaaaatatattgttcaccatccatactaatgtctgtgaatccttttctaaacaattccgcgattttatctctgtcctcggtgttcttaaagtatactcgcttatatatacctgctgattctgaatttagatacacgtatggtctactttttagtgcttcaagatttttcgcagatttatttcccatgtatatttgaacatataccccaattactgtaatcgcagcaccaagataaccaccccaaaatccaagccaaccatcatcacttccaatactcgtaaaacgagacattccaaaattaagtagaatcggaggcacaattccaataactatccaaaagcaaaaatttttaattatacgccagctgtcacggttcttcaattaaagcactccttttttgtactcctctatgataactaaagtaactttaaattaccataacaaaaagtcccgccatttctggcgagacccacgcgatgctgactaactttttcatcaggaatattccctcaactgaatatcctataatatcattgtacaacttaaaagttgcgccgttgttgcagatttgttgcacggtcaatcaacgttcaacaatgtcttgtaatgcatcaaacccgtatagcagaactgatatatcgttgatagcattggctttagcacgactgattgttgctttatcgcaattataaaacaaggcaatctcaggaatgcttaaatggggtgtggataagtagtacttgtttagcacttgatagcgtcgatattcggcttcaccaccactctcgcattggactttatatccagctaaaattgcatcgagataacgcaacatcatccgtgatttttcatgatacttagcaatagaatctaactgaattatttcaccgttaccaacttcataagaaagtgtcgcatcaattggcgaattagttttaatatgcagctttaacttacggtagttactcaggagtagattagtatttcgcaagcgccggtcgtgctctcttttcttggttattttcttatgcttagcatcctgtttcaagacttccttagtgatcacagacaatgcttcagttgttaaatccttaatatcaattcccatctaatcactccaattttaatcgctggttaaatcttgcctttctttcaaacatcttctccaaattgacatccccagaataggttccttctatgcgcactgaacagcctgactggtcatcgactaatgaatgttctattgtttcccaatgtgtactgctaatgtaggtaactaaatttttatcaattgatttcaagtcaattattgcgaacccattatttttcaagaaggtcatcatttgtttaaagagtttccgtcgttgtcgttttttcaaggaactacctcccgttaaagattaatatcgatattcttttctttcttgtaaacatccagatagatttcatttttatcaccattgaatgtcgcctcatagtatctaccgtctggaaccggtgtgcttaaaagtgctttattgttctgtaacactcgcactaaccaaacaacataaacttcataactatcaattgtaccgccatccgtatgttcatttacataatccacaacggcttgtttgctttttgaaataaaactttgattatccatttaatttcccccttaggcaatcacaatcacatgaccactattaatttcttcatccagatttctagttaaatattctttgacgttgctcattgcttcaagttcccaggcaccaccgtctgctgcaaagatggcactcttcatcccttcgcgcattcggaatacgaagttactggttggttgggtaacttcgttaaatgtccggtatggtgccaagccaactgggttcggcactttcacttgatcaaccgatgcaaccccagttttaatcgtaactgcttggctcacgccgtcatcactggcattgcgaacagcttcttccttcaggttgccaatcactttcaaaagaatgttgcggtcctttgtttcttcaaactgcgattgcaatgagatgttcatttgttcctgatctaaaaagttcccgtaataaatttcaggtgtcatggctttagcccgaaccagctgctcacgacgaccgtactcatctaagtggccgaagacaatcaccttgattggtgacttaacttgaatgtaaagattttgcgttttacgctcatccatacttttaaccaagtcgacgacacccatgagcgttgtgacctcaactgcagtatcagatagattttgcggtttaagcaggcggacatccccgttaccgtcaatagcgaagtgctcgcgatcaaccgtaataaccttccccttaccggcttccaaactcaattcgtgtaatctgttgattgtatctgttgtcatttccatgttaatcatcctccgaatataattctttaaagtatgcttctgtttctttgacgacccattcaggataagtaccagcctttgaaaattccccgccagttacttctgaaatgatatcttcataacgggcagacattagcgccaattcaaaagcgatatctaaactacactcttttaacacttgatcaggttcatcaaaatattcattaacaactttcaatttcaagccatcatcttgtgttctctgtaatccattattcttatacgtatcatatttttcaccgttgtaagtaaatagcatattgtattcctcctaaattaattctttccaattttcaactaattcactaacaatagcgccgtagccatcttcgttatctgaatgccaaatttctatgagtaaataggtgccatcatcaaagccctcaatccggattaactggtcactaggatagttggtagtctcgattaatgttttagcataggcaacattattaaagtcacctatatttctttcaatcaagtctgacaccaatgccacatcatacacatcttccgtatcatgaaatggttcttcacttgtcggattaatataatatgctccttcgaataaatcttttttattgattagtatctttcttttaagaacttcgacttctggtaattcatcccattgattcatatcgctcatccctagccctgattttgtaaatcaatcacgttatcttttttagaactatctgctccgatgtcatcaatcggttcgccggtatctgtcttgattgtttcatcctcagtatcaaaataggtctgtcctggcacacctgatttcaattcagcgacagcaaccatgccagtatcgatgttgcggcccaatagcatcgttgtcgtgacaccaatctgtggcgctagtttagacttaacatcgaccgccacgtcaacggcatctcgtttatcattggggatgaaggtcaaatcaatcgtgacctttcgttttgtttttgattcagtgttcaagtctagaatgttatcggcgaccttttgcaattcagtggtgaatttttcttgagcgccaccatctgcgatttttgataaatcgaaattaaaaagttgttcagccatcatgctatctccatttcttattaggtttgtgccacttctgatatgaggtcatgtccaggtgcttttcagcgtaagtaagacgaattctcgtcccaccaagcatctttttaattgcttcaagctgcttggcaaaatcgacggtactgataccaatttcaactctatcgatatgagtttgagcggtatcctgatgatccaccgaaatatctttgcgcccgccgcttagcagcgacttcattttgtttttgaatctctctagcatctaattgttcctccattcgattagtagcttgttccaataaatcaacggcctcttttcttgaacaacgcaggtgccgcataagcgcttctagcgtgatgcgttgcccagccattaagtgctcggataaaacttgaactctcgtattaatcattaccatgtctcctttcgataaatgaataggcctgataaaacgaataagatgatacatcccatgattaatttaacgaatgggatgccagcggtggcgagaaataaaatgatatagatcattgggatgcctccaaactaaacatattgaacctcatcagcaataaagatacctgcaagtagttgttcaaattcagcgttcttcagttcaaaataagcttgcatgtcacgcaggtcatttgctccctctaaccagtcagttagtaaatggtccaattcagattggcacgtgttattcccacatctgggttcaacggccccgttatacccatagtcgctcacgcaatgtgcgagatcaatatatttctcttcgagttgaataataatgggttgcataattactgttcctccaaatatttagatttctgaatctatgtttgcttcaatcaaacaaactcatctgaccacgacttttaataaacggccttatttcgcgttcaaaatcatcttccggcagttcgtaccagcttgtttcagattcacctagataggttaatccgtggtttttgacccgttttaattgatcgtttttaagcgatgaatccgcgcctgcaaaccaactacgccctcgcaagtaaatgaaccagcgaccatcagtttctcgaaataatgaatacttataatcattgatacagaacacacggttgttatctatcttcaattaacgcacctccaaacatttgactattaatgcataattggccaatatgaactaatcatcaaacgtttatatcgacctcacaaatatcggtctgccaaattccaatactgtccaacatccctcgacctggtccaattgtttatcggcaccattcaatgaatcgcaatcggcttgcgccaaaatgatatcgttatataaaaataaactgtattctcgaatcacatgatcttgaacccgaccaatgcaataagcgcgtggtactttaatttctggtgttgtcatcattagtccccctcatatcaattttttcatttcagaatcatttatagtcacatagcagccttcgttaattgttgctacccacatcccggttttgatttcaatgcgatgagttctattcacttttatgtttaatatccctgattgcgtgacatggatatcatatttttcaatcaaccttggggatccatcaaattgctcaattgggatttctctgagaaagttgtcaatcatctattaatcctccctgtacggcgccacatcttcagatagacgtgccagccagtttcttcgtaatattttgtttctaatccactaatctcatacttagggtattgctcctgaaaataagacatcccttgatcaggagtcattgctactcgttcaatttttcttgggccatagtgactatcatttggccgtgaagtaggtctgatcagattacgggatgatgaccagcgttttctaccttttgggtccttcgctagataggtcaaaattccttcaagtccgttctcattagtctggatataacgagtgttgaccatccctacccgttcacgaggctgtcccttaggtttctttgaccaaagtgcctcgacatcatcacgtgttaagccttcagagacactattgatgatcaagtgatggttgaatcgaactgatgtcgtaccaccttcattgaccaggatgtatttgagttcttgccctaacttcttatatctggtcttcagtctgcggatatagttagagacctctttttcagcttgttccattgtttccggttgaaacttatccttgtagctcaaactgatgaaccagtcaccttctgtgaaattaccattcccaagttgacgcaagtatcgcttagcattcttttcattcagattacgttgcttgggtgcggactcccgtttcttttttgaacgtgtgcctcgcttggcaaccatgtctgcttcccacgtccgaggaatgatgtccacttccatataatctggcccacaatatattttcttttctcgcataaatctcatttgaattacaccacctaaaaaacgcgcttaagttaataccacatacaagcacgctataagccgccttctcacttgttgacttcaacgccttaacagcagtataattcagttatcggatgaattattgaagtcttgactcgtgagagttgaggcctttttttgtgcctaaattttgattagaactcatcattattaatactcaattcatagcggtcactaatcattttcttaaccgattgaacgtcggtgttgctgccataataattaatgcgaattggccgatcgtcatcgctagcgaatcccccaacctcgatattaggtgccataccgaaaagattttgaatatctctttgaatctgcgttgctaccatttgggcatattctgctttagcccagactgaaaaggtctgcggcttttttaatttgtcgtccattttaaaaccctccattaattaattgtttgaaaaacattgcttcggtttaagtgttgaattgacattctcaactcagtatcgggcaaccagttctcgataaactcaaggccgtcatcaaacttagcctggggtaagtcgctataacgcgggatactaaatgcttgtttgaagtcgcgccataattggctgaaggctttagcactgaaatgctgataagcagctgatttcttcccgcctaaaatgctaacaacttgcttgcgaccgtacgattgtagtgtgaattggttagccgatgtgatgcgcatattgtcttttaacatgttgacgtccgacttaattttcttttgctcctgcagctggttgatcatcatatcttccattgacatcggtaaagctttggcctgtttttccatatcgataaagtattggcgggccatcttaccaacttctgtgcgctgaatcatggaaacctctttagccatgtcgattgtcattgcgtattcgatacgtgggcgaccaccagaacttttccccgaaattggggaaaagtctcttccttctgtaaagccgtatgccaccatgtctttaaaccaggttgagaaatccttccctaccttcaagaagcgatgtaagtcccgaccactgacaaccgtctggccatcgttattttgaaacgtctgaatcagttcgttcatcgtcatttcctcctttaaagaattccttgtaattaacaccgataaaagtaacgattgaactcatgattattactgtcacgataaattgcatgtctttcggaatataaagacctgcgataatgctgatcatgactgctagataaaaattcttattcatttgtatttcaactccttcataattcttggaaagttattccgcaagaactgcgtaaatttcaatgattcaattttgtatttgccaccattgaatggatagaaaacacagccaccattatcaatatccagttgcttcttaaacacctgcagtattttggagaggtctttataggtataacctgatacctcgcaggctttatttaaatcccagataatctgttgatcggcttccaaccgctctctatcttcagtggcaattaactccatgccagctggcaattcgattgtgaactgtgggacgatgactttagtacgttccattgttttacctcctgtaatagacaattaatgtctgatatactcaccttagaaaggtggtaatactgtgaagcaaaatattgattgtattcgtgatatcttactaaccgttgaaaaagatgtgccactagacggccatattgatctcaaaaatctgactctcccaaattcttatgatcgagatgatatcgtctattctcttaagctattaaaagaagctaactacttaaacgtgacgctcacaggagcttccaacacttactatttagtttggattggaaacatgacctacgatggccaccaatttcttgactcaataaggaatgccaatgtttggcaatctactaaagacaagattgctaattttggcagtgacctttctctttcactaatttctcaagtagcgatgtcagtcattaaatcgcaactaaacctttaatcgaatagttttatctctttgccatctacaagcgtgtagacactacttctatatgcttgtatttttttatccttcgaaataaatgacagcatatccatgaatcctcctgaatgctgggcgataaatatattgtcgttattttgcttcctgtaaataatgaatgagttctgcatccctaaatcacctcccactattagtaacgtagcaacctgctgaaatggtaaaagaaattttatttgtttaatcagttatttacctatcactaagcaactcgtcaatcgtaattccaaaataatttgctactcgttttaagttgtcgactgacgggattcatttgcaaaaacatagacttaactgtacttgataactaattcacatttgctatacttattttgaaaggtggtgacaacaatgaataaagacgaatttaacaaaatatttgatcataatatggatcttgcgtctaacgaattttggtctcaagaaaaaatacaagaacgtattgatcaattttcagataagaacggtaagctcgatatgaatagatttggtgtttttttagctgaccaatctcgagtatatactgaaaaattcacttacaatcttctctttgatctattagttgatgatgcaactaatgactcgcaaaaggattctgaatctatatgagtaccctgattccgcgactccatacaactcgcaattgtatggagttctttttgtatagcccacaaaactctgattaatggtttcatccctactcacctcctttaatgagttgcctgtttatcactaagcaactcgttcatatcaacttccaaataatcagctacttttttgagtacaattgcacttggactggcattattccattttgataaagtaccatttgaaatttttagatctcgttcaattcgataaactgaaattccttttttacgtgccgctcgtttgatttcgtcatatatcactaaaacaccccctattgaatataatctaaaaatattatcaatttacattgacacgaattagataatattctattattaggacatagaaaataagcactgacacacattgctccccagctatgtttgactgtactgttatttgtttgtccttttttaagaacaaattcagtataatagattattgtcagtgagtcaactattttattagaatattggaagtggtgactttatatgacatctttaaaagacagaattaagcaactagcaagcgaacacgctatgtctattgctgaattagaaagaaaattaaattttgcaaacggatctatttcaaaatgggataagcaatctccatctatggatcgaattactatcgttgctgactattttaatgtaactaccgactatctaattggtagaaatcaaactccgaaagatgcaactgaaaaagaaaccaaagaattaaaaaatattattaataatgaagccggcctcacctactctgcggaatcagtgacccctgaagaccgtgcggcaattgatagtatgattgcggcttactattggaacaaagggcgccatagaatatttgatgatgatcaaaaaaaggagtgatctagatggccatatttaatgattcatctgacctccagcaatatttgattaatcatgatttattcgactatcaaaagctgataaatgaattcgatatcgatattgttagaactaatgaaatgccagaaacacttctaggccttgctgtgccacgaactagaacgatattcattaatagtgcgccctcacctgttggcgaaactttcgtattgatacatgaactaacacacgtgttaatgggggttgaatcagctgcattttataaaagtagctatgtttcaacgcgtaaaaatgaagtggtcgctaacaacggcgcattctttatcctggttagagagtttactaaccagtggggtatcgataagcttcattttaatatcaatacttttatggattactatcgaattcctcttatgtactactttcagattgaagcattcgtcgctcagtacgtagacgaaatcttcgcataaaaaaagcgccctacttcgtggggaagtaagacgcatattgctccgataaaaataaaaaagagcaacaaccataaatacagtttaacatatctggaggagatattgtgaaaaaattattatttttaagtgtcgttactcttagcacacttacactagcagcatgtggtaactcagtggacaattcggggaagtctaatgttgctgacaagagcggcaaagttgtttcaaagaagaaagcaaaaaaggacagcaaggaagttacgaacggtccattacttaaagttgggcaatggactactgaaaaggataccggaaagttaactttaatgaagattgctacacctaaacttgacgtccctaacggccctgtaacatttaaaattaatgatgttaaattattcaaagaagaaacaaaaaataatgatcagttggaatattcaaaagaagcattcagtgcctcatctcttgaaaagacattctactatgtacaaattgattacactatgaataatacttctaacgaagaagttcaatacaatggtattaattctattgtcactaacgatggtactcagcttgatttagatggtcaattacaggatcaaggtcttggcgataaaattgctcctaaagctaacaaacaaacaatagtacttgctgttgttaaaccagatacatccgaattaaaggtaactttcggcgaagttggtcaaagttcaggagattatactacgctatctgaaaaatcagaaacagctacggttacgttgaaataatagggatgaatatcagttatcagttaacctgacaatgagtacaaagctcactgtctaatttgcaaaaaaaaaacattataaattccctgagaaattttataatgaacaacgaaactaggtgtttttaatagatgtttgatgaacagatgatgttacgattttcaaaaaaggcatatgcggatcgtctcgactatataggtgttgggaataatgattcatcccgttttatgtggaccgataataaacatatagaagttcatatttacgagatatttgatggaacttggagcaatggttttaataaattctttttaatttttgcagttgaagcggataaagattgtatagtttttaaagatcttttcgaacaaactcataactatgagtttgagcaaataagaacgcctaaactacagctttcttacctagtaaagattggaattttaactaaagggtttatttcaaggataaaccctaatagtttagaaactaaaattggtgatgaatcaacttttagttctacctttacaagatgggccgtcgattttgcaaataatgaatatactagttcgaagtcatctttagaaaagcataatttaattcaatcattccctacactgaataaaaaattatttattgataaatatcgctttaatgacatgcttgaaattattaaagatgatcaattcacggatgaatttaaccaatgcttattcgcctatgaaaatgaaaaatggtttctttgtgctgctggcatcggaagtacacttgagcacctcatgttattaactcttactaactacggcacacaaaaaagtttgggtagaaatccaacagcaaaagactatcttaaagcattcaccaataaaccaatactactagattcgcgccaacaaacttatatcgataccttatttcgactacgaaattccgttgatcatcataatagcggctacacttctaaaggaatttgcgatatgttacttgatggagtaggtagtatttttaacgaatactaccttgaatcgttatcaaaaagtagtaattaacttatctaacaatattgcatcccttacatctgggctaccatagataatattttcacttttatttgaattgtttatcgtatcaaaaaagcacatcccccaccgaccaaagttaaggatatgcttcacagaaataacgcaaaatattgtgcgctatttgcgtactctattttagcttaaaatggaggttttaacaatggcacaaatttttaaacgtaatggtacttggggctatcgggtttcaattgatagaactcacaacaaacaaaagagtggtttcaagaaaaaatcagacgccatagcagctgcacaagaactcgaactaatgaagaatgctggtacccttgttactgttaccgatgcaacctttgctggttacttcgagaaatgggccaagacttataaaattgggcgactacatcaaacaaccgagtcgaaatataaagtggccattaaattagttgaaacgaattttgaaaatgttaaattaaggaatgttaaatccgctgattatcaaaggatgttagatcaatatgctgaaacacacgttaaagatagcacgcgattactgaatagctattttagaaatgccgtcaagtatgctattaacgatggcctactcacacgtgattttacctttggcgcattaattactggtttagaatctaaagacagcagcttgaagtttttggagtacgacgaagcagaacgattaaaaaaactatgtatcgaaaccggctcttttatggtggtcacaagagttgaaatactatttggcttactaacaggctgtcggtacggcgaagttgccggcttaacttgggattgtgtggactttgaagctcgcaccatcacgatcaataaggcctatgattataaaactcgaaaaggtttcactaaaacaaaaacaatcacatcaaatcgaacaatatcaatcacaccgcagcttgctaaaattctaaaatcatttcaggttcagcagcggagccaatttttaaaacaaggatttaaaaacaaactaggtttcgtctttatgaccaaccgccacgaaattcccagtgacactgcagctaacaaaacactaaaaaaaatactacttgaactgaagactaaaaatgttatcacctttcatggtctaagacacactcatgcatcaatgctcattgccaaaggtgtctcaattgattatatttctgaacgacttggccacgcaaacacaagtgtaacttatgaagtctatacgcatttacttcaaactagtcgcgaacgtgaagatgaaaaagcactcaaaattttgagtaatctataaatttgagcatgcagattcgtgcagatttcgtgcagaaaacgcagaataaatgcagagaattcaaaaaagaaagtcaaaggtttgacctgccatatacccctaccatcccttatatatcaacactttaagcaactcactaataatagtttttaaatggtttgaatgtggtttaaattcccgggtggcgcatatatatcccatagaaaaaagccccgttgattttatcaaatcgacggggcttttttgttgtcctatttatcaaagaaactatttcctacttcaaagaaaaggtattggttattaactttaacttgtcccagaatggctttttgagcttttgttgcccagaaatatgagtagcgcggatggccatacgcatcgtttaaagcgggtaagctcgtgcccggatctctgacgacaacttttttcatgtcagttttttgtttattttgtgctgcttggccggtttctttgaagaattcactttccgtcaataaacggtagccattcccctgcaaccagcgcaacccactattgttcatcgcgataagattcatataatcggttgtcagtgcccctttaacgtatttatctggatagacaccatcccaaccatcttgattatcggcttctgcagcagcactgctggccgatgctttaaaatctttttcattaatcacaacttcatcactggccgctttcgtccgttcagaagagggttggtaaaaaacgcccgattgcgttgaccctttttgggcaacgctttggctagcgttgttatttctgataaaccaagttaatccaccaacgacaatcaacactaaaaccaccccctggatgattagtgtcttcttacgtttagcacgcgcttttgaaaaatcagattcccattgcgtcataattggcccctttttgtacttcgccatcttgttccccccaaaagcatcctattcgtaaatccctttaactttatactgacactataccaaagtaatcgctatttttaaatagttactcactttttaatgacttttaccctagcgattggcttataatgaataataaaccttgaaggagtccttcttttgaataaacgaatcagttcttgtacaaccattttagtaggaaaaaaggcctcgcttgatggctcaacccttatcgctagaaatgaggatggctacaacaagcctaatccgcaaaaattctgcgttattcaaccagccgatcaacccgttgattacacctcagccattaatgggctcaaaatcaaactaccaacaagtccgttacgttacacttcgacacccgatgccgatgatcaatatggtatttgggctggtgccggcattaatagcgccaacgtcgcgatgactgcatgcgaaacaattaccaacaatccccatatcttagcgattgatccgctaactgatgacgggattggtgaagcggatttcgtaacgctcgttctgccttatagccaatcagctcgccaagccgtgttacgtttaggtcaactccttgaaacctatggcacttacgaaaccaacggcatcgctttttccgatcacgatgaagtttggtatttagaaacaatcggcgggcatcactgggcagcaattcgtatcccagataacgcctttgttgttgcgcctaatcgtctcaacattgctggattcgattttgcctcaccaaatacgctattctcaaaagatctaccaagtctaattgcgcaataccatctcaatcctgatgaagatcaagtaaacctccgccacatctttggtacagcaaccatcaaggattctcattataataatccccgcgcttatgccattttaaaagcatttggtggtcttgatgagggtgactatgaagatcaagaactgcccttcatgatggtccccactaaaaaactaacgattgaagccgttaaatgggccctcagttctcatttcgagaacacgccttttgatccttatggcacaggttcaaaagatgaccgtcaacactaccggacaatcggtttaaatcgaaatgaagaaacgcatattctgcaaattcgcaacgatgtccccgaagcgattgccgggattcattggttagcatttggccccaacacctttaacggtttagtgccattttatgccaatacaaatacgacgccggccatttatcgtgagacacaaaccagctttgatcctaacaatatttactggttaaatcgtctaacagccctactcggagatactgacttcaatcgttatcaaggactccgcgatgcttttgaagcccaagcattaattgattgtcgcaagattcaactcaaaacggacgccgcaattttagctaatccggaaaatagcaccgcgcaactcactgccgctaaccaagcgctcgctgatgcttacttcatgaacctcaatcagctccttggaaaaatggtaactaccggcgctaaccatatgaaactacgctattcattaaatgattaataaagaagggttaagtagcgattgttactcaacccttcttttgttgtacaatagtccttataaacgtttctattgaggagcttctatattaatgcaatattttaaaaagttatttttaaatacctttacgtttttaaaacaaagccaagcttatttccgcagtgttttattaatgcatggctttttacttttaatttgcctaccgcttttaagtaaagccagctacttcattttagtacattaccagattcagtttttagcgttgagcaatctgcccgtacttattcaccagcacccctttgcgcttctagcgctcgtgggaattgcactactgattttattactggccttcttcgaattcacatttctactattaagtgtgtattttattcagattaaacgaccactggccctgcaagcattacttaagatgacggtcgcccaaattacgcatctgcgcatcggcaccatttttttcttcctatattattacatcctaattatcccattgggcggtttgggttatcactccgatttattgacaaaatttaaattgcccgcctttattttagattacatcatcaccaatcgacggctgattgccgttttggggttcctcatttatctgagcttgttatatattggtttgcgcctcatcttcaccctccccaatatcattcttcaacaaatgtcgttaaaaaaagcgctacggacgagctggcgctttacgcatcaccaattagtaaccctagttggtcggttgttactcatcgttgggggcctcgttggttttacagccgttagtttcttcttattaattcagcttcaggcgttcattgaaacccataccagcgtcggtttccaaagtgcagttctactcatgacacttttacaagtggtcgtcctcattaacctggtcctctcaactgtcgccatcttcttcgtactggttgattatctactatccgattcacaatttaatcggcctgcaatcaactattctagtctcaaactgagtgtccccctcaatagcggcttattattgctagtagcaacggttactttaattggtgccggcttttacaattgggattaccttcgcgccgtatcaattcaacaaccaatcagcatctcacaccgcggtgtctctcaaaaaaatggcgttcaaaattcactcactgcgctcaaccaaacgcaccgcttaaaacccgactacgtggaaatggatgtccaactgaccaaagatcatcaattcgttgtctttcatgactttcagctggcgccgttaactggtcattcaggcacaccgcaatcaaaaacactggcgcaactcaccaatatgacagtgcgcgaacataagcgcaccgcaccaattgcgtcatttgacgactatctcgcactcgccaaccaacgccatcaaaaactcttgattgaaattaaaacaccaactaccgataatccaggcttagtgcaaaaattcctagctaaataccaaactaacattgaaactcacgatcacatggtgcagtccttgaactggcaagtggtagaagatgtcaaaaaagcagcaccgcaaattcaaaccggttatatcctgccctttaatttcatcgggccacccatttcacacgccgatttctacgcggttgaaatgacgactgtcaaccggcactttattcaagcggcgcatcaagaaaagaaagccgtctttgtttggacacccaatgatcaacaggcagtccaacggatgatgtattttggtgcggatggcgtgatcaccgataatctcaaagcagttgaacaagcccaaaaccaacacacaaaaccgcattacgccgataaattagcattttatgtgatgggtattggataataaaaaaagtcatcattaaaatgatgactttttttatttagcataggtaaccacttgggtttgatctggatgtgcttttaaccatttggctaaagcgactcctagttcatgtgccattggcattgccgcgcgcatttgcgccggtgtaatctcattgacgtgcatcccagacactaagaccgcattattcgtaatcagtggcttaacagtttttaaaacctgatcaattaatactttttcttgatggacatgtcctgggcggctaggaagtgccgtggtcaatgccttacccgttttatcgaccgtcgtgatgacgccgtaatggggcacgtcgccaccgataatctgaattaataaatcagacgtttggcgctctaattttaagtgcattgtataatccgtttcagtgaccgcaaattgtacggtttgttcggtactagcgagcgttttgacgtgcattagctaacccctcccaacgtgaaccaaggttggtctcgatatgcagttgatccaataatttcattaccgtatgattgacgatatcatctatcgtttgtggttgattataaaaagctggaatcggcggtacaatcgccacacccatttgggccaacttcaacatattttcaaggtgaatctgattaaaaggagattcacggggcacaataattaatggtcgtcgttctttcaaagtgacatcggcagctctggcaatcaagttttcaccaagtccagttgcaatcgaagctaaagttttcatgctagtgggtacaatcaccatgccatcgtgtttgaaactaccgctggcaattgttgcgcccatattttgctctggatggacaaaatcagctagcgccacgacttgcttttcagtgtacccagttttttcgatggctaaattttctttggcccagcgactcatgaccagatgtgtttcaacatctggcacttggtgtaatgcctctagcaaacgaatcccataaattgtcccactggcacccgaaataccgacgactattttacgcatattattccccttttcttctaattaatctaaatatttttgccaatctgtgatttctttaaattgcgcacgcttgaaactcttttgcatgtcatatgggaaagtcccgtctaatactaacttagaactcatcccacgcacacgaatccgagctggatcgtattctggtaattcagatggatctaatggatgattccgtaaaccttctaagaccatgatgtcccgatcggcttggaaccgtgtattgatggtccacatcacgtcgttccaatcgaaaatgtcgacatcttcgtccactaagatgaccgtcttcaattctttgaaggctgaaaaggcgagcaacgcagcttgtctttgaatcccttcatcggcttcgttatccttatgaatttgcatgatagtcattaatttcccaccaccagcaggggcgttatagacgttcaatactttacctggaatagcgcgctccactaagctcaaaattgatgcttcagttggaataccggccattgaaacgtgttcttctgaaggaccaattgtcgtttgaacaattggattatcttgacgatgggtgaccgctttaactttaatcacatttacggcaggatttgctgaaccgttataaccagggaattctggcatcgcatacccagaattcgtattaatatcttcttgcattgattggtttggtaaaatttcggcttcgataatccattcagcacgagcaatccctaaggcatcaacagcgacaccaggcactacttgaacagcttcatttcttaaagcaccggcaatttggagttcattgtaaccaagtggtgttgtaggtggttcaaaagtagccccaatggtaatcgctggatccaagccaatgttaatggtgattggcattggttcgttgattgcctcgtattcttttaagaacgcaccgatatggcgaccaccgggcatgatgtacatcccgattgtatctttatcttcaaggaccatccggtgaatcgtaacgtcgctttgttggtgatcaacgctatgaccatacacgacacccattgtgatatatgggccagcatcgtcttctgtattggttggtgctgctaataatttgcggatatcaaaatcagcatcgctcgctaaatgaacgacttcttgtgctggtgcttgttcgcgtgtcacttcgacgggggcaactggtttggttaccgcttcgtttaacatttgacccagcgttttgtagtcatgatgtaaaatcgttgcgacccgttggcgtgaagcttgcaagccaattaaaacacgacttccagggaagcctttaacattattaaacatcattgttgggccttcggttgttggccgcatgactgtcccgccagcaccaatataacgatagacacccgctaaatcagcattgggatcaatttcaacatccgtttcatgatattggcctggtaaatctttgatttcagccaatactttacgtaaatcataaggttgttcactcataaataagcctccttggcgtattgaatacaaccattattaaacaaagcgcgcaggcgaacaattcaaactaaaaacgcatctattctaaattggaatagatgcgttttctaattttcctgaataaattgccagaataaacgcactgactctgattgatttgcttggcgtttaataaaggctaactgactgtattgttttggatgaatcgggacggcaaccacgttttcgtaacccgctaggtcaaaagaatggttcatcatgattgaaacgcccattttttgattcagcatctccaaaattaaatcaactcgccggccttcatagacgatttgcggtgccacaccggcttgctcgagggtctgcatcaccggtgctaagacgtttgtcgccccatccaatagtagaaaaggctcgtgggctaaatcttgaacggtcaatgcggtctgctgtgcgagtggattatcacgcgccatcaacgcaacaaaataatcccgctcctcgcctaaaaccgcatattcagcctgtggtttttcaaataaacgggtaaacacgatatccgcccggccatcatctaaagacggtattaattgatttgtctctgcctcactaaacttgaggttgatttctggatgttgctgattaaattgaaaaattaactgaaaagcttggtagcgcgaaatcgttggaatacccttaatcactaatgtttggtccgtttgattaatctgctgatcgatggtttgtaataaccgttgctccgcttgaattaaggttttaacacccggtaaaatggccgcgcccgctttcgtcaacgttactgttctgtggtcacgcgtaaataacgtgaccccccagtctttttcaagcgccatgatatattttgagaccgtggcctgagttgaaaagatgttttcagctgttcgactataattacacgtttgcgctaagtcgataaatgttgccaattttcgagtatccattcgctttcctccaacgtattcatatttggaatattttagcacaaaattggaattgttccgccttttttaaaccagtaaactggtaaatattgatttacctactaattatctatgggaggctattatgccaattggaattatgattaatgccctatccgtcttattaggcggtatttttggcgctttgggcggtaaaaagatgtccgccaactttaaagatggactcaatatggcctttggggtttgctcaatgaccatggggatttacgccattgcacctatgaaaaatatggcagccgtgatttttgccattattatcgggactggcttcggcttattgattcacttaggtgactggattaatcggggtgccgtacaaatgcaaaaattcatctcgcgcttcatcaatgcaccaactggcttggatcggcaaacatttgatgcaaccctcgttaccgtcattgttttattctgtgccagtggtactgggatttatggttctttaactgaagggatgaatggcgatgccacgattctaatttctaaatcgattctagatttctttacggccgctattttcgccgcaaacttaggctttgtcgtttcattaattgccattccgcaattcgtgatctttattgccctattcttcgcagcacacttaatctaccccctcacaaccccttcaatgatttttgattttaaggccgctggtggtgttttgatgctcgcaactggctttagaatggtccagctaaaaatgtttccgaccgcggatatgataccggcgatgattgtcatcatgccgctgtcctggctatggacaactattattttaccaatgctctaaacgcaaaaaacgaccagctaactggtcgtttttttataccctattttttaaataattgttttacctgtagataagcgaaaataagcaaggtcaataataataatagccctaggtaaacacctagaaaaataatgctaatgcccattcctcctaattccgtactaccgcctgcatagagttcacgaaaagctgaccacttaaaaataatttttgcaatcactattgtgcttaaaaagaaaaaggcatttttaaaagcacgccataaattaagttgcatcatgtaccttcctacttcttcttaaacatatctttccccaaataacaaaagaacgacagtgccatgggataaaccagcaacactttgtttgctccttcactttccttttattatacgcgattatcttgcaaaataaaaaaggtgttgcggtaaaaattaatttcaccgcaacacctttttaatagtctaatattaatcctcaggagatatccaacttatgacacacgcgcttcgcttttactaatgcatcaaacgttgtgccttttgagcggcaacgttcatgatgttccaaggccggtcgaaaccaggttggaagaagaagtcagcgtaagctaaatcgtcaaccgtcatcttgccttggatggctaatgagatagcgttgatattagctgtgacgtctgctttagacatgatttgtgcgcctaaaatccggcctgtttcaggatcgaatgttaatttgaatttaacttctgggttttcgtcagctgggacgaaatgaggacgataagtttctgtaacaacgacggattgggtcttaacgcctgacttatcagcagtcccttctttaattcccgttgaagcaaagtgataatcgaaaacacttaaggctgacgaaccggaaacagctggcactggttggtcagctgtgaccaagtttttagcagcgtagcgaccttgacggcgggcattcgttgctaaagcgattgggatttcttcgccaataggtgcatatttaacaaccgttgcatcccccaccgcaaagatatcaggttgactcgtttgtagatattcattgattttaatccgaccactacggtctaaatcaagcacatctttcaaccaagctgtatttggacgaatgccagcagcttcgataactaaatcggcatcatattcggcttgatccgtcacaaccttagtaactttaccgtcagcaccgcggtattccttaacagattgaccgactgctggataaatattatgggcttgcatttcagttgttaattcatctgtaaattcttgatcgaggtataaactcaatagacgtggtaagacatcaacaactgtcacgtttttaccagctttggcaaagacttcagcagcttcgataccgatatagcctgaaccaatgacaacaacgtttttcacagttggatcaaccgttttggccttgagcttaatcgcccaatcacgaccacgcattgcataaacgttagctaaatcgcgaccagcaacgggaagttcaaatggcacagccccgacacttaagacgagcttatcgtaactttcttcacgagttgtgttattttttaaatccttaacctgaaccgtatgttggtcagcgttaatggctgtaatagcttgttgtaaacgaacatcgacacctttagcacgcatgccttctggcgttgcatagctaacatcgtcaacattcttgactgttccttctaaatagagttgcatcccgcaggataagaacgatagaaaatcgccctgttcgtaccattggattgttgcatccggataatctagtaaactttcttgaactgtttcgaacccaccatgggatgaaccgacaacaataattttcacactgatcactccttgtctattttgtacaacttaattataacgcagataataattattacaaatgaattcggttacgccgccattctttttatagcgtttaccgttaatcacatgctaaactaacagtaccaaaaacttcgattggagactaagtaattgctcaaacaaaaattgaaacgcaatattccgacactaatctacctcgtaaccctctatgttgcctaccaaattctcaccacaattatcacggtttttactgatcaaacgattctcaaaatggccaaggaatcacctagtggcttcattgttttatttggaggtttttacttcttatatattattcttgctgttggcgttttatactcaggccacattctctctaaacaagatggtcactacgagctctcattattaatcctgaatatcctatcgactttcacgacgctaaccacgattatcctgaaattttcaggtgctcaaatgccagcgccattattaccaatgaccttcttcattatcctcaccacgatttcgttggcaaccacctcgaaattgttgcagatgcggaccaaccgattaactaaagcaaattaatcaccgcatgcagaatcattgaacactttaaatccttcgtccagaaataggtcgtccctagaatccagcccatcgcacaataaatcaaccaattataattaattgccatttcatgcagactgccaaataccaatcctgaaacaacgatcttcaagaaactattgaatctggttttcttcagaaaaaagaaattgaaaaagagtcctctaaataatagctcttcaattgttggtgcgattaagccattgccgattgttgttaaataaggcgctgcctgcattcgctgatcaatcaccacctgattttgtggtaacgctagtggattccactgttgatcaaaccagtttaacaagtaactcgctgctagcataagcaatataatcccaaccttcttaatcactgggaccgctacttctggcccgttagtttttgacaagcgacgataaataaccagtaacaaggccaataaaagcccccacatgattaaatcaaacacgataaaccgcatttcatgctgggctagataatgattgctaacccctaataattcttcaacatagatcacactggttaataaaactaacaaaatgaaataacagacgcgattcatagtaaccatttcaaaccacctaatttttcgatttaagattagtatgccataatcgattttaactgttggtcaattttaatgaacgtcaataattgctcgataaacgtcaaaaaaaggtatcgcgaaaattcgcgatacctttttttaaataacctatccaacaacacccttgcttgtgtctgctggtttgaagaggtgttcaataatacctgaaacccgtgttaaatcaacattaccgcctgaaaccatcgcaacaatattcttatcttcaagccacttaggatcaatcttgccacttaataaggcagctgttggtaatgcaccagcaccttctgtgacaatcttagtccgttgcatcaagtcagtcattgccattgcgatttcgtcttcagtgactaagatgaattcgtctactaggttttgaacaactgggtaagttaagtctcctggaatagcaacatctgtaccatctgctaatgtgaagtcatcatggtgacttgtaattttgccagcatcgattgaagccgccatcccgtgtacattttcagattgaaccccgataatgtgaattgatgggttgaaagatttcaaagctgttgccacacctgaaattaagccgcccccaccaacagggataattactgtgtcgacattccaaatttcatctaagatttcaagaccaattgtgccttggccagccatgacttcacgatcatcgtaaggatgaacgattgtcatgcctttttcttctgctaattgttccatgtataaacgtgcatcgttaaacgttgcaccgtgtaagacaacgttagcaccgtagccagctgttgcttcttgtttagcaattggggcttcttctggcataacaactgttgcatcaattcccaataacttagcggttaatgcgacaccttgtgcatggttaccagctgatgctgttacaatcccacgttgacgttgttcttcagttaaatgattaattttattattggcacctctaaatttaaacgagcctgttaattgcatgttttctaatttcagataaacattgcccttagcgacattccggcttaaaaacatcgattgaattaatggtgtttcccggatgtaaggtttgattgttgcccgcgcctcttcaatatcacgaatatcacaaatgtcagctgtcttcaaaactaaattatttgttgccataatggccacctcttccatattgattaatcctgaacatgaatattagtgccttttgtactatcattcacaatttaaatgtagtcctctttggcccacttgtcaaagggaatcccgcgtttattagaacgttttcatatggtaattagcagcttctcattattatcgacatttaacgtccaatcgcattaaactgcgaaagactgactaattggaagtcttgctcaacttttaaatttaaagattgttcaattagttcaatcacctttgcttgtcccaaactgcttcgaatactataaccttcaccatataaacgaatttggtcgaactgcccttgaagccgttcaacgactgatgctgcctctaacggcgtcttcaacgccaataaataccaactggtgccatcacctgttaaactcatatgcttaaagaaatcaaaatacgttttatcaaacattatcaaaacctccttttatatataaagcgctatcaatagttgtataatagcatatgatagctataaaacaaggagatgtcacaatgaaagaagccattttagtctatacaacccttcccttaattattgggagcaactttagcagtcaccacgagcaggaatttgtgatgcacttaaacaccgcgcttgccgccaaacaattggattggcatgtttcattagatgaaagttttggagacagccaggccattaaggccaaaaagcccgccgccttaattctaaaaaatggcttacagcaccaatttgagcggcacgattttgatcaaaaccaaatctaccaacttggcgcactagaactatcaacactcagtacacgctcagtcgtcgcatttttagcgaatcattaaaggggttgggacaaaagttatttttgtcccaaccccttattaaattttaaatatttatcgttgtaccgtattttataacgacattaattggatcagggccggtgaaaccttaaagccgttgaccatcaagaaataattaatcgcctgttgatagtcattgcggcattgactatccaagtacccatttttaacagccgctgcgcccttgtttaaatgagtcgctaattggtaatctgccgctacttgcggatcactcaaggcgacttcaattaaccgcaaaatgttcagcaatccttgatcactagccaacttttttcctccaattcgacaaacatcatcagcccttcttagtgattaaattttcgataattaaccacaaacccaacacaatacagaagaagtcaaaccaccatgaaatggtgctgatacttgcattaataatcgaccagcttgaaaataaaagatagagcccgaaataaaaatcaattgctttataaaaaaagtgattaaatgtcattctaattccccttaaaaaatgccgttagtaaccatatcgaatgttagagagtgccgttagtgctttgacttgttcagattgcgcagtcgataaagtcagaccatcttcttgaagcgcattggcaattgccaaatttaagcgactcaagatcaagggcacacttgcttttttactttcaagttctgcctgataagtcgttaaaacagtttgtaaagcaggtcctttcgaagcatcctgcaacgccttaattattgtaatcgcttgttcactacgttctgaaccacctgaataccatttcatattatccaactcctattcttaatgcataccgccaaacatcattgaagaggcgattaaaccgtaacctaaattcaaatcgcgtaatcgttttcgatctaatttttctaatttatgatgaatgtaaccatataaattgcgattagcacgcggtaagcttatcgatacgatgtaattttcatgataagcattgtagatatcgacacagacactaagcgaatctgcaccttcgattaatcgcttggcacctgctaataaggctgccttgtattcatatttttgtggttgatttgataaatcttcattgtaagctgcatcgattaaatcgaatagttcttgatcattaattgtcaatataaccaactcccttatgacactattatgctgccaattaccattttcgagtaaaaaaaatattaacgttcaactttatcggttaaacgttaatatttggtattagtatgtattcttattactatttcgaaggcgcaaaaattaagctttatcgcctaaaaataagcctgatacgattaatgaaatccctattatgacaccaacaatatccaaccaccaagaaacactaaacatcgtttcattgaatactgtaaaactagttattaaggcccaaataccaatatagagatctaatgatttatagaaattcttttttaaacgcattattaatgcactcctccatttaaatataaatacgactgttgctaattatcaaaacaagacaaaagcgaaccaatcaattttacacattgtccgtaaagataaggtgacaatcagtcaacaattgaaacaagataaagcagcagaaacagcttttggtccaaaagcatctggtactaaaggcgacacaattgattatcgtttcaaggttactgctgataaagacaacaatgctgatgttaaggatatcgtcattgataacattgtgatggatccagccggcaagttggactacctaacaggcattaccgcaacagcgggtacgaagaagattacgcttaagaatgtcgcattgaagaaatcacaagtattaatggtgaactacaagatgaaggttacagcggatatggatggcgacgtaaacaacgatgggcttttgacagctaacgggtttacagatcagaccaacaccgctgccgctgataaaggcaagtttaatacaaccacattgacattgaagaaacaaaagaacacggcaaccattcaacaatttattagaaatccagcaacggctatttcgggacaagcatggtttggtcctggatatggggatggtaaggccgaaacaacggctgtacctggtgatgagattatgtatcgttttgatattacgttaccaactgatagtacgtcaggaaagtataccaatgatgaggctttagtgaatgctgctattcaagatattacgatgaatgtgccggatgatttggaattagtatcacttgatggttatccagataaacagattcaaatcagttatggttcaacaaccgttcgttctacagtatcagacactttagcaagtcttaaggcgattgccttgaagacaccacttgatgcagacaagaaagtaatggtcaaatatcaagtattggttaaggataatgctaagacacaagatattacgaatgatgctaacttctacgctgacaacttaaccggtgatttaacggataagacggttgctaattatcaacataagacaaaagctaaccaatcgaagttgaagatccggaataagaaagaagttaaacttgaacaaacgctcaagaatacaacgacggaagatacatcaacatcaactgaccctaaatatcctgataaggatggttaccgtgtagaaacaactgccggtaaaggggatgtcatcgattatcgttacaaggtaacggcagcagctgacaatacggggaatatcaccaacatgaaggttaatacgattatgatgaagaagtccgataaactttcatttagtgatccggataccggtaatgactatccgttagttgttaaaatcagcaaggccgatgggacgaatgaaacgacagatgcaaatgctaaatttagtgctgatcatcagacgattacactttcgcaaccattgaagccgggatatatagcaactatcagttataagatgcaggtgactgcaagtgtcgatgataatacattaacagcggataaagtggtgacaaatgatgctaaattaacagcagacgaattgacagaaactaaaacaacgtcaactgggactgaaaatgtattaattgctggtaatacaatgaacttcaatcaaacaatattgaatttgaagaagaatatcggcgaaatcattatccgttacgttgatctagaagataacgatttaagtcagccaacttatattgccactgaagttgatgaaaaaggaacttcaggtactaagttatcgactgttaactcagcacgagtagcacctaaggttatcgatgggtatacaatccatgcagtaacggaaagtactgatttaacgaacgctaactggtctaaagcgtacaaggatgaccctgtctttacggataaggttcggacgattacgtatggctattacaagcggatgctttcagttgaagcaccaagttattgggattttggtacccataatcggacacaaacagatagtacctactatctagaagatcgtaagacaccacaagcgttaaagtaactgatcactacggtgttgattcatggcaattacaagttgcacaagaaaaaccgtttacggacgatcgtaaacaagtcttgaaagatgcagaactacaatttaaaaatggggctgttattgcggatgtgggtaacacaacgccaaatcaagcaatgtcttcggttgatagctttaatttaaaatctggcgatacggtcaagaatttaatgacctataccaaggttgggcttttccagaatgatgaccctgataaggatcaaagtaataaaaacaatccttacagcgatgatcaaggtaaggggagttggtactatcaatttggtgataagaagaatgctgatatcagcattggcttacatgtcccagagacaactaaacgggataatacaacctatacaacgactttagattggacattaacggttgcaccataggaggaatcaaatcgtgtttagaaaacgattattaagaaatataattttaggattggccataggcgtgatgggcggttttgcgctgtcacaacaagttcaggccgactctacaactgaaaaagcagattttgaaatccagccaattatgccggaaggtcaagttgatacgagtttgaattacttcgatgttaagttcaaaccaggaacgacccataccattaagatgcgtgttcaaaattttacggataagaaaatcacaattagaagtgaatttcaaaatgggatgactcaaatgggtggcgatatgaaatttcaatcgtctactaaagggttagatccgagtgctaaaatcccgttaacaacaattggggctgtgcgtaaatcagatcgcgtgcttcacttaggaccacaagaaccaactgttattcaagcaacgattaagatgccggaagataactttaacggtctgatttctggcggttggcattttatcgaatatcgtgacaataaaaccgatgaacaaacgatttcgagtaattacgcctatatgattagtgtcgtcttgcgagggtcacattataaggtttatccagaactgaaatatgattcgacaaaacctattttgtataataatcgacctgcgatgggggttaaacttcgtaatacacaacctatgattttgaaaaatgttcatttcaaagccgttgtatcgaagaagggccttttctctgataagcgcctttacgaaaaagaaggctcaagtattgcacctaattcatctgtgacacttccaatttcttgggagtataacaacatgaaggcaggcacctaccaagtctcggtaaaagttactggtgaaaacctttggaataaattaccaatgtcttggacgtttaagaaaacctttaaagtttcaaaagcggctgcggctgatttaaataaacgttcaattcaacgtccaactaataaatggttgtacgtcttggcagctaacggggtcttgttattagttgcagcatacggactctataaagttattaggattggttaatgtgatgcggaaatatcggcgatatgtattaataatgaccatgttggttggtatggtattgacgctaggaattggcacagcacaagcagctaaaaagaagagtaccattaagcttccagcagctaataaagcaacatttatgttaatgccagaattacccaaagataatattggcggcaagcagttaggttattttaatcttcatattaagcctaatcaggtgaaaacaattcggattaaagtttataacccaactgaacatacgattaacatctatggccaggtgaaggatgcaactaccaatgacaatggtggcacaaaattaccacaaactgataaaacagttgctgggatttcatttggtgataacagcgacaatggtaacactggttacttacgtcttcaaatggtacctcacacattagattttggtaatcataaaattttagatgactcaaaattagactttactgctgatggtaagaatacatcattatcaacaaataaccttaaagcaagttatgaaggcggcaagactaacgaaacagctgttttaaacacaaatgatccagaattaaagaagggccatgttgatggtactgcttgggcaacagttgttgataaacaagtaacacgtaaagattctcaaagcaatagtgctaaccctaacaacacaactgatccaacaagtgatttctgggaaggaacaacttcaaaagctggttcatggaaattatcagttaaatcagtagatgctttaacagctatggataatgctgatccttcaaaaccaactactgaaacaattactggtgctaaattatcatttgacaatacacaatacggtcaaactcaacaagtagctgaattaacaaaagatacacaagatgctacttacacatctgatgttgcagcacttgctacacaaccaacagttgcaccagttgcaactgctaacatcaataagagtttctcaacaccattagctgttggcggtacagatattacagttgccgaagctaaagatggcgaaggccaaggtgctaacgtctttggttggacaccagaaaacatcaagttaacaatgcctgcaggtgcagaagttacaaatgctatctacaaagctaacttaacatggacattaagctcaacagttgcataaaaaaactttaatccaatctgaaacagattagactaaagctcataagtaaagatattcgtaaaagtggtcggtagtttgccttcgaaaaccaactgccggtcgcttttgcatacatagctatgataacacagaagcaggtattaaatgaaggtgcctaggcttagggggaacataaaatggcggagcaacacgaaattttaagtatcagtgagtggtatcttgatgcacaacaaaaaattagccgattaaacaaagcaagtgaagcgtatggtttgacttatgatcaattcctcgttttggaacaaatcatcgagcttgggaataaccgacctgggcaaatcgctaagaaatttaacacatcacccccagctgcttcacgtaagttgaatgctttgcaaaataagcattacattatgaaggcgcacaacgtagatgatgatcaacgaactgtgcaactagaagtgaccagagaaggtagagagaagtacgctgccttacgggatgtgttatatcagattggctaattatttaaaaaaaggactggggtaagatgacttttatcacagtcttttttgctacctattaattggtgtttattttgataggagggttgctacttttcagaaaattgactagaatagatataatgattttgtgaagtaagaggagaaacaatgacacaacgctatcgagtaacggtcgcctatgatgggactgattttgccggctttcaagttcagcctaagcaacgcacagttcaaggcaccttggaaaaagctttaaccaagatgagtaagggcgcctatattcaagtttacggttccggccgaacagactctggcgtccacgctatgggccaagttgtgcatttcgactatccatctgagctccccgctaaaagcatgctacgggccttaaacagccttttaccgttagatatggaagtggttgatagccaattggcagatgatgattttcatgcgcgcttttcaacggtcggcaagcggtatatgtaccgggttgatctgggccattataccaatccgtttaaacggcgttatacgggtcactatccttatccaatcgatgttgaacggattaaggcggcattgcccgacgtgatggggacgcatgactatacgagttttgcggccgctggaggggtcatcaaggataaggtcagaacaatctatgaagcaaccgttgtatacaacgaagctgaaaacgaacttatttttgaattccatggcaatggctttttatataatatggtccgcatcttagtggccactttattggaaatcggtaacggtcgccgcgacgtacatgactttttacgattgtatgaagtgaaggatcggcaacaggcgcgctcaaccgcgccagcaagcggtttgtatttaaaagaagtttattataaatagactggaaatatatgagattcgattgacttaatcaataaattacggtactatagtatctggtattgtttgccccacgataggccccggaaacttattgagtgtcaaacaaacacagaatattggaggaataaatcgtgcgtacaacttacatggctaaaccaggcgaagtagaacgtaaatggtatgtgatcgatgcaacagatattgcattaggtcgtctatcaactgtagtcgcttctatcttacgcggtaaaaataaaccaacatttacacctaacgttgatacaggtgataacatcatcgtcatcaacgctgaaaaaattaaattaacaggtcgcaaagcaaccgacaagttatatcatcaccatagtaatcatcctggtggtttgaaaactcgtactgctggcgaaattcgtgaaaacaacccagaacgtttaattgaaatgtcagttaaagggatgttacctaagaactcattgggtcacaaccaattcttgaagttacacgtttacgctggtggcgaacacaaacaccaagcacaaaatccagaagtcttagacatcacggacattatttaaggaggaaactatagtggctcaagtaacttataacggtacaggccgtcgtaaaaactcagtagctcgtgtacgtttagtaccaggtactggtaaaatcactatcaacaacaaagacgttgttgattacgttccatttgctaacttgattttagatatgaaacaacctttaacaattactgaaacaacagatagctatgatatcttggtaaacgttaatggtggtggattctcaggccaagctggtgcaatccgtcacggtatttcacgtgccctattgacagttgaccctgacttccgtccagctcttaagagtgctggcatgttaacacgtgaccctcgtatgaaggaacgtaagaaaccaggtcttaagaaagctcgtaaagcatcacaattctcaaaacgttaatattatttcttacatggcaacgattcaatccattttatggtgcaaattggcgcaaatgttaaaaatattattaaaaacctctcgttcattcgggaggtttttttgttttattacagattatctatgtatgctatacttcttaataataaaagttacttactatggtatccaaaaaagagggatcaaattggagaactatggtgcgctaatctagttattttacgttaaaggtattaagggggggcttatgaaatatttcattgctgatatgcatttttaccattatgacattattggtttcagtaataggccgtttactgatattgcagatatgaatcagcaattaattagtaattggaataatactgttatgtcatctgaggatgaagtttacgtcttaggtgattttgtttatatgggtgacggaaaacaagcgactgatattttaagacaactacgtggaaaaaaatatctcataaaaggtaatcatgaagaatatttgaatgatccagaatttgacgattcacaatttgagtgggtgaaggattactattcgttcagatatgaccaacgtcagtttgtgttatttcattatccaatgttggaatgggacggtttttatgatcgaacaattcaactgtatggtcacgtacaccaaacacgagccgactattttaagaatatgcttgggataaatgcgttgaatgttggtgcggatatgattaattatcggccaattagtattaataatgttatccagattattaatgaacgagaaatgtcttggtaatatttaatgaattctatttctcaaaggagtttacgtgatggataaagtaacgattttaagtcgaaagagatttttagagtatttacccgatgttgctaaggaaaaagtagttgctattcggattggtgataaagcaccagttaaagataaagcatcagataactatgccgatacactctctttagcgttttatgatgagtggacttttgctgaaaatcttgatcgtaatacgccattaggcagtaatcggttaacaattgaagacaagattattattgataacttcattgatcaatatgtagattgttattttgttgttcattgtgaacaaggtattagtagaagtgctgcaattggctattatattttaaagcgtcttggctatattggagagcttaatgaaaagaaggaaagtgcactatattttcctaacattgaggtatatggcctcttaactggcaaaccatatacaagtaaaactgcaacggaattacgccgggaaattaataaatcggaataagttattaagaattaaaaaaatgaaagtatgtaaatgaacaaggacaattaaactaaggaatttaatggaaagtataaaaagcacttctcaaatatagagaggtgctttttggtttatagcgaatttagtaaatctaaagcttcactatctagaacatgttgtttctcaggcattaaagatacgtaatattgttgtgttgtaagtaaactagagtgacctaaacgctgtgaaatataatctagagtaatcttatcattagcaaagagaacagatgcatgcgtatccctgagaccgtgaaaagtagttctaggtatatccaaacttttaagtaatttagccaactttgcagattgatgaaatccgtcaggatcaaataaatacccgtcttgtttttcctgaaccttttttaaaattgcataaacttctttatttatactcacattacgatgagagtgctctgttttaagccttgtgtcattcgaagtggggctgatagaacgtgtgatgtgcacaccatattcgtatatatcagacgttgtaagcccaagtaattcaccacggcgagcgccagtttctaacgccaataataccaatatattaaaatcagaatcatggttattaagtagaaactgccgtaactctctaaaattagtaatagagagtgctttattccgttttggcggtacgagtcctcttgttttaacaagactagcgaaatccgtactgataagacctctaccataagcgtagtgtagtgatgttcgaatttttaacaacacttcgtgtacagtcttgcgagagtgggtaagggcgtactcatcaacctttatctgaaccactgtatcatttagcctacttaatggaatatcattaaaaaggtattttacaataggtattactcgttgatagtttacaaaagttgctggtcgtacatcattctttttaacaatataaacgaaattttcaaagaagttagcaaagggtgtttcacgttgtgctaaatcgacaccatttgcttttgtaagttcttgttgtaatgcccaccgtgttgcttccgcctttgttgagaaggtttttgaaagttttttattataaccatgtttgtaatttgaaatttctgctctatatgaatttcctcgtttgataattgacgacataatacactcctaagaaattgaatgattcataataaaatcattcaaggtttgaactgtaaaacgttcctgtcgtcccaccataaagcgtgggagttcatcactcgatctaacgtatttgtcgaatgattttggatcaattcctaagaacacactcgcctgttctcttgtaagtaataacggtaatttaggataatcagtaaacatatttccccctccttatacgagaatagtattcgcttcgttttccccatttattgtaatcgaatcaggttctttcagtattctatcgagtacagctttttggttagatgtcatatcttcacgagatttaatagcacctgtaaccatcgcccaataaagagttgtatcaatggaacaattagcacaggttctaggtgaaacaacacgatattctcccattttaggaggataatcccaaccagctttaaatccttcttcaggcgtatgaaagaactcaatttttccgcagttttcacaaacatatttaagtttataagccattatttttgtcctccgtatattttatttttcgataacgaacgggattatcaataagctgattatccctataaattttactaacataggttgtctcgtataaaacaaccgattgatcgaattctagattttcattcaatagaatcttgtcttctgttggcttcttcaaatttcttgaagcaaaatagctctttttcccaaatgaatctagcagttcttgaccaatacctttttcgaagtatttagtaacataacggcctcgattgtctttagaatcaacatcaaccctgttcaatcgaacagctccgtgaccccaaatctttaataattgagagtgttttataaatggaacgtcaaataataaaatatgtgtgtgataagcaccgcgcttctgtttttctagtacagcaacatattttaattcactttttttcgtatgaaatatttgataattaaatcttttaatgaacgttttaagcatcagtaaaaatgtggcacgatctttaatattttctttcgtagtaagagtaaggaaagaggttctatcatcgtaattacaatcaataattctcaataagcgccatttagcgcgtagtcgattattctccatacggtgcaaacgttccttttgttcttcggatgttagttcatcaaaatcgaatcggtgttgtttttcatctaaaaaatcagtaggaataatactctcatcagaatgtgtaataattggcttggaatattgccaaatttcaatataagggcccgttctaacgactttttgattataaaatttcataaaaagtcagtccttttttcgccattctttgttttatataataaataaacgagaagttcggcaagccgaccttcaaactactaaggcacacctgattttggggtcgttccactgcgctttgtcgtcccgacagcgcacccctgttaaaatcatgtgtgccaaagtagtttaattattatttgctcgtaggcacaggtaaaacgtcagtacagttgatccaaatgcgaccgttaaattgccccatctgcaagttagcaagttttacaggagtcgtcttagagtttttaagtgattctactgcaaccgtaggatttaaatttttcactttcacagtaattaaatcaaagtaaaaaggggatttctcatcttgaatgctaatttctaaagagtaagattctagctctcccgagtcgcggttcttattttctgaatatcctttaactgctaaaaaactgtttcctaatttatcaattgttaaaaagtcattaatttccatgtcatattgtcctcgtttcgtttattcatcagcgtagctgatgtgaatctgatatttatagtgcgattaaaaaacaatcacactataaatatcagatgaaattgtccttatttggtgcaattcttgtaattatcgtcaaaaagtcgctcttagttttcacgtctacaaacggtgcgataataggcaagggttcgtttagaccgagaccgtccgcataaaataaaccaccgcctttgctactagggggcgtgggaacttcttcaagatcacacatgctaaaagccatattcaagcggtctttagatggttgtccaagaaagattatgctagtaatctgtaagcggatttcactaggtatattttccgcattcggatcttgcgtggaaatgacaagatgacaagcagcttgcctaccttttttcgcaattaaacctagatacccaagtatttcttgccacaggttcttgccatccttcgagctaccacattcatccttgattgaggccaattcatctataaataaaaaattaggagtcatatttaaatcatatgcgtcagcgttcagggctccctgatgtttgattatttcgaatcgcgagttcatctcgtctacaaattctctagccaattttgctagcatatttggagacgagcctatagaaatatgttcactgccgagattctcctgtataagttcccctaaagcaaataagtccgcacctttaccatcaacaattgataactgtgagcgtggatctgtgccacaccctttggctattgcttgatataggtaccactggagtgcaattgtcttgccactccccgtgcgtccatacaagcctagcattgaactcttgctcaacgagaagctgatcgtattcgacaggggaataatatcaagtgggacatcagaaaaaagttctttagtcaaatcatctgaagaaaaaacccattgatcaagcggttgttcctctccaagcaaatacacgatcttattcgtatcactgaacttatcaattaacggtaaagagagtaatgtttctaaccctgaatctaggctatctaacaacttatcctctttcatattggacgatttaaaggctacaacgcctatgttgtcaccatccgtaaagtagctcaaggtagctgtttctggaatatcattatcatacatgagacaaagcagtagataatcgtaattaaattctattttgaatacctgtttcattttttttaatagtttaaatagtcggggaatggagagaataattaataataaaaatgctaacatccagaaagtattgcctgatagcatagcaagaaatagcaatacggtttccaaggagaaaatgtagaaaaatatctttcgcaacgttcccttgtaatgtaaaaacccgttaggttgtttccaactaaccagtggctctttacctttttttctctgataatattcgacaagtaattgaatcatagcttgtccataatacttctaacaaaatttttcaaagcgataaccctgcgtttgccttcgaaaaatagggcgctgataattccgatagacgcaatcgaaaagataatatattttaatatgatatttcccatatggacaccgaaatacatacataacgcgaaaacaatcatccctaaataaaatttaaaattattactcatttatttaccctctaatttttattttatctgtattaaagatctttttgaggggggagaatgactacaagacataaatattaataactccttttatattttaatttctgcagttatcatagcgtggtcaggataaccagctcgattaaaaacatatccatcagtttcaacaaatccccaataatacgattcattaagcacagcgccattcgagaaaatatgatcgttttttatgaatctttttggattcgattgcggaattctcttttgctcccaagagaagcatcttcttccttggggagtatacggcttaaaaccgtactccagcatttgtttaactattaatggataactatggtagttttggagccatcgcttatcgtccttccagctagtgatactggattcatcgttataatagtagttattaaagtcgccgacaacaaacgtttgcccgtctagatcctttatataagaaacaagagaaattacttgttcattgcgctctttagcgtcatcaattaaagattgatctgttacaggaaaagtaaacccgattcgaatacgagtacctatgatattgattatttcgttgttgacttgaaatgatacttgtaaaaaattgggggtttcaatagggcttgtgatttcattaacaacctgtacagtatttttgtcagaaatcaaatttttcttaatagctattagcacttcatttgtttttctatttaaatttgcattatagaagactgcatagccgagttccttcaaggattgagtgaactcaagatgatcggattgcttgacgtactcagtgagaacaatcaagtccgcttttttcttctgtatttcgcttatgactaaatgaggaactgttccgagagagttatagcctgaacgttgattgatattccaaccaataacttttagttttttcatataatgtgatcctcctttaaaaatccttaatgacaatgaagaagtttatgaggctaaaaaataacaggcaatgcctgcttaatcattttcttgattttcataaaactttacaagataatcgataacttgaccttgcgtaggaataaaaccgaaaatggcaataagtctacctgtaattaaatcgatcgaggttttagtacttttgtctatcacagcactaaatttaacggggtcaggaaatctcttatcaattggaacagcttttccgcgaggcataacgaaacctcctttctgctctgcaattaacttcataaacttctttaaaggcataaagccatcatacacgggaattaagtaaaaaacaagcattatcgcaaattggcgtaaaaatcatgtatatagacggtgctctaagttcgtctatcctctttatatgctatgagatgttgataataaaggatatctaagtattgatattcctttgaattttctccgttattgctcaaaacgttaatatcaatccgatattattcggttttgcaaaacaccccacaacttatggttgtggggtgtttttttgaaggtgttattttctggaaaaatacgagaattgattacctaacgtttgatactttaaaaaaaataagaaaataatgtttttactttaaggatgtcgtataataatataaataacttaattgggggattgtaaatggatcagtttaaattagacagcaccgttaataaagtaatagttgatggcactttaaaaggttacttacactatcttgaagaacgcaaagaaaaaaagaatcaatgaatgtgagtggcgcttatgcatggacaaaaggaaatcatatcgatgatcaaatttctaaaattggaaaggacatcgatgtgcagtttaaaatagaaaaagctgggtacacttgggagtatttgcagtttacagttaaacagaatgctgaagactatatgcttattgtaaagaatgctagacgagttgttaagtcttttagtagaaatatgcataaacctaacgaggataactatttagttggtttggcaaaagatataaatacgccaatttttaagaatagaactcggaattttgttgataagcctgaacaaattcagctggaattaaatgctccagcagaggtcaacgctgtaatagaagggactcaattgtctgtagagcataattactcacgtttttatattgtgacttatgaaattgatgatcagactaagcttattaattctgtccaattaacgatgccaaacgcacaaacaatgaatttagaattaattgaagatttgagctatttaattcaagaaagtgagtacgaagtttctcctgaagatgttgaaccaattataaatgagaaggtttctaaccagacgactttctcaggaactgcgaatgcattcggatactctgttcccgaagaagaagcagaagagaattctgggaattaattttcaaccaataagcaaggatgtgattatcatgtttttcggagagaagttacagagtgttagagaattaaatggtctctccagaaaggaacttgctgacaaattagggttaagtgaacaagcaatttggcagtatgaaaaccaatacaccgtaccgaaatttgaagtaactaatgaactgaaaaaaatatttaatgtaaaatctcagtttttctataccgcaccatttacgactaatgtttctacagttgatagtattgcatatcgagctgacgatcgagatgctcgaaaaaagacaaaaatggaaacgatgtttatcgactatactagttatttcttagatatatttgaaggtaaacttaatttaccgacaacgactattcggtcgttaagagctaaatcaatacaaattaataacacgttcatggtaaaaaatgatcgtgtttcgattttagagagtgttgctgagaatgctagagagaagctagatttacaagataattcagagcttctttacaaacttgaactttcaggaatctatattttagaaaaaaatatgggttctagtattgatgcgtatagtacctggaccaatgcagatcaaccattcattattcttggaagcaagaaaaaatcagcggttagaagaaattttgatttggcccacgaattaggacatctattaatccattacaagattgatatggatagcttaactaaagatgagcataaagtaattgaaagagaagcaaatatttttgcctcgtgttttcttttgcctaaggatgaattcttaaaagatttttcaataattcaaaaaaagtcaaatccggactcatatttagatttaaaaatgaaatatatggtttcaataggtgcgctagaatatcacgcttacaaattaggcttgcttacctttgaagagaatcgttatttttatgcaacgttaaatcgaaaaggatatagaaaaaatgaacctttagatgaagatatcgcgattattagaccgggaaagatacgttcattattagatattatttttaggaatcatctttggtcgctaacggatattttaaataagtattacatcgatcgttcatttcttgattcactgtttggacttgagaatacctttctagagaggtatggagaggaaccgataagagaatattttgataactcaaatattgttactttattctctggtgaaaagtaagttggttggtacatcaatatattattatatttgctacaataaagaaaacctctggtattggcgtttagcccaatatcagaggttttcttttattagttttgataatgctagtaaaagtatgctagataatgcttctattttgaagtcgatgtacttattaaaataaatcagcgttgaaatcggttcctaattagtggataatcaattgcatagacaattatgagggggaatagttgtgaagcatagagtatggatcgttgtgattttgatcatcgcggtaattggtggcgtttggggttatacgcggtaccaggatcagcaaaaagaagcgcaaatcacgacgcagttagataatattcaaaaggatgttaagacttttaatgaggcgcaaggggatgcacggaaattaacagtcctgaaaaaaatggtgacggcagccgatcgttaccatcaaaaagataatcagagtagcaaggttaatcaggcctatcatgtagcgattacgatgggtcaaggcgtttttaaaaatcaaaaccaacaagtattaaaggataatacactttccaaagctgttagtgccgagactgttacgagcaaaaatgaccggttacaagagctattggccgatgttaatcagcagtggtcaaccgtgtatacgacacaagggttgaaaaaaatgacgcaacaaatcaaaacgacgattaaagcgaataaggaatatgttaaacaagaagaagctgttcaggaaacagcatcatcaacgtcatcagaaacggcaaccaaagctttgcctaaacaagcccaggccatgaattacgaagaggttaaaaccggtaactatgcgagtctaaatggtacttggcaaaatggtgagggtcgaaagattgccattagggatcaaatgatgcaattttcagatatcttagaccacaagggaaccgcaactgtaatcggacaaagaattgatattccgggattagatggccaagatggtagaccgcaagatgtgccatatttaggtggtacaacgactaaagcctacgaacaacaattaaaatcaggggaaaaagatggcgtctttactttagggagtacaattccaagtgcagtcctaacgatttcattcttacctaaaggcacgatgggtgatttaaccgatggcgacgttaaccaagataaaatcatttcggttggcacgcaagcgagtgctacttctgtcgatgcagcagctgtttactacaaagttaattagcaccataaaaagaccgttcaagttttaaacttgaacggtcttttttgatgaccatcgcttaactttgcacatagacgtcagtcaatgacatgttactggtccagatgacaatcacgtttttcgaattggtggtactgccgccttcaaggccgtattcagtgctggtaccaattggatagaaggtgacagaccaattagtggcaactgaatccgctaataggactgctaggctaccattaacggttttaaaattgactggatgcaaacctgcattgtcttttaagccagctttgctgagcgttatactgtctgatgtgagttgattgttggtaatcgctaaaggtttggcattatcgattgtcatctcgcgacctttagcttggcgactacttaactgccattgaccggcgatattactgtaatcgcccgcttggatctgagtgagattcatgccagtttgctttgccggtgtttgtgatgttgttgaatcacttttggcgacacgcgacgttgtgctgtgtgaggccgattttggatgactagttgaagcaaccttagcgttcttattgtgactagtttgtggggcttttatttgagcttgcccacaggcggctaacgttaatatggctatgacactcaaaatgacggttaaatgcttctgcatatttctaatactcccccgagttagataataacatggtgattatttttaatgcatgttctccgataccgataatatgtttgacagtatcgtgttgaattgtgttcaattaagagatagaccccgttgtaacatattctttgtcatctatttcacggtaacatgctggtgagtgaatcagatcgtttgtctttataatcatacattcctcccaagaattttacgatattttaaagtctgttaagctagttgacgataagttagctatattactagcataacagtcactttatgctgttaatagtgtcaattaacctcgaaagtgtcaatgtagcatgcacttaatacatataatactcgtatatcgttttgctacgctaaacggagggtttaattttatgacaattaatttttttggtgagaggttgaaggcggtccgtaaagcaaagcggttgactcaactagaactttcaaaacgactgggggtcagtaagggaaccgtttctgcctatgagcaagggctatcatacccatccttagaaacgctggtcagtatttgtagtattcttgatacgtcagcggactacttattgaatatttctgatgatttaccttttaaaatgggtggtttaacggacgagcaaactgaaagtattttgagagttgtctcgttgattgaaaaagccaatgaaaccttgaatgatttaaataagaagtaagtcgctattattcaagaaaacacctcgtaacgggcagttgtggggtgtttttttaattgctcaaaaagtcagccttccgctcgatagacgaagtacggttcgatattatataatcagcttaaagtagcagtgtcagttaatgagataaggagcgtggcgtgatgaaaaagttatttgataagcggcaagtgaatcaggatgataatccagagttcgattcattctttacggaagttttgcaaaagttaccacgacaatcagcggcgattattgccaagtccttcaaccagtctaaagcattggcggagaagacgatggccaagagccagacgcagtttgatagcgtctttgccgacttcttagtgggtgttgacgatcaaaaacggcaacaagcccataatattattcatgcagcctcgttaacagcggcgattattggttgttcaccaattccattttcagatgctttcttattagtacctgtccaattgacaatgatggcccgcttgcataaattattcggccaatcttggtcggcgagtcttggtaaaagtttgtcgaaggaattagttttagttgggttaggtcgcagtgctgtcgggaatatcttgaagcttgtgccagttgtcgggacagtcactggggcagcagttaacgcaacggttgcgatgtcgatcaccgaagcactgggttggttgacggttaaaatgctcaacgatggcgaggatatttttaacgacatgctgtcctttaaaaatcagttcaaaacgttgtttgggttgctacaaagaaagtaatgtctttcaattgacagtcatcaccgttaatgatttaataaacccacatcactagtttcgggaggctttttaaaatggtaaaagtattaatcgtgcataccaacatcacgcggtatcaaggcacaactgatcccacgggtttatggttgggtgagtcggcagaatttgtcgcagaaatgcaaaaggcgggcatcgactatgactttatcagtcctaaaagtggttttgtgccgcttgatccacgggggatgaagtataccgatgaagcgattttggagatttatgaacaaccagattacgttcaacgcggcttagttgccacattgaagcctagcgacgttaatccggctgcttatgcagcgatttactatacagggggccacggtgtgatgtgggacttcccagataatgccgaaatccaagcgattgcgcgggcaatttatcaacaaggtggctacctgtcttcagtctgtcacggtattgcaggactcttgcaattaaaagatacaaaaggtcagtttgtgattgccggtaaaaaagtaaccggttttacaacagccgaagaagtgttggcaggtaagaagaacgtcgtaccatttttaaatgaaggagtggccgctcaaaacggcgccgaattcactaaaaagcgggcgtataagtcattcgctgtccaagatggccaattagtaacgggccaaaatccgttctcagttcgggcagtcactgacttattaattcctgccattcaaaaataatgggtgccgtagtggtgcaaattatgttaagctgataggaacagaatagttgggagtatgaaaatggaacaaaagcaaaaagaaaaaatgcaagccttaatcgatcaaaaaaagggtggcggtaagtcaaaacaaactgacgtcgctaagaatgatcggacaaagatgcgtaaaggcccaaagatttttacagaaattcactggtaatcgacttgtcgattactatttttttgccttaatttgggattaacttgccaggcgacagtatatgtcggtagcttttcctataataaaaccacattagtttaaatcaatattgggggttattaaattggaaataggtgcatgggcagattgggtaaatgtagtcgcaacagcgatattagcgttaatcgcaggggtttggagtttttggtcatatcgcaagcaacgtgatccagagttgaactttattttgaccaacgtgtctgttgatgagcgtgaagagtctagaggtgatccaaaggggtatcaaattttagtgctcaataatagtacaagtaattacgtcgttttaaaaaacgaagtaccacgggcaacaggtttgtataagtctaaatatgtggaacaacctttttatgcggacgtgattgttaagccgcaagagaatacaccgttgtgtcagtttaaaggtaatttacgctatgggttaaaactcaatgatgatcgcgaagtgacgccagcgctagattacgtcagctggtatgtgacagacgtgattaatcataagtactataaattaacgttattagcgcctaaaaaagaagatgctaatcatttattgcgattaaaagtaacgaaacgtaaagcacctttaagcaatgaacggattaaggcgattaagcgtgattgtcccaatctcgatgctaagaagggctcacaggtcgtattgtagaagggttatcgattgacagcggttgggattagcttaaaataagcataatatagtttattctaaggtgataggagtttaccaatgtctgatttaatcgcacaaatgcaacaccatgtttctgttcggaattttgaagcgacacccttgagcgctgaggtaaaacagcaattaattgcggcggcccagagtggttcgtcatctaacttcgtccaatctttttcaatcattgaagtgacggacttagcgttgcgtgccgagattgccacgatttccaacagtgctagctacgtcaatcagacagggacattttacgttttcgttgcggatttgtaccggcaagctagcatgttgaaagcccagggccaatctttggcgggcatccaaaatatggaggccttgctagtcgcgagtgttgatacgacgattgctgccgaagatatggcggtcgccgcggaatcactaggactcgggatttgttatatcggtgggattcgcaatgatatcgcgcgggtagctgaattacttggcttgccagaatatacagtgcccctctttgggctaacggtaggtattccgaagaccaaaaatcaggttaaaccacgattgccacaaatcaatcaagtagcgcagaatcaatatccacgggcgcaatttacggatttaaagcagtatgatcggcaaatcgctgattattacgctaatcggggatcaaatcaacaacaggctgactggacaagtaagaatttagcctttttcagtgcaccacgccgtccagaagtcggggcctttttgaagaaacagggttttacgttagcatagaaagagaatcactagtgatagtggttttttttagttggaattgtcacatataattgacaattctcacagaaattgtaaactataattagtcatttatatgtgacagttgcgaggggatagacatgaataatattagagaatatcgccagtcgattgggatatcacagactgaattggctagacgtgtccaggtggcgcgccagacgattaacttaattgagaataataaatataatccatcattggatttatgtattagattagcgcaagtgttagaaacggatctaaatacgttattttggaaggtgggggagcgtaatgcttaaccgttttgaagagtggttattaaaacaacaaattggttatttgggggcgcgcgatgaacaacaaagcgcgacgattaatcatattttggtaaaggccaacttattaacttattgtgtgctgacaattttgatgttcgttagtttaatttgggacttatctcacggggcaatgttgacgttggggactttctttttgattctaacgcaactgattaacagcgtttatacggcgcgtttggtccgtaaagctgcggttgatcagactgaattttatgacacacctacttaccaagccgcacttaagcaattgaaggtccgttcggtttggcgaggcatcaattgggcagttgggatgttcatttggctgacaattgtgatcccattcatccaacaacgtctgacagatgccagctggacgttagccattatctggggcgtatcagggatcatcgttggcgtgggcagttatttcagaaagaaaaaggatttacatttattacgggaataaagtctgaaaaggaccctggcgctaattgcttagggttctttttgacatcccggcgacaaacttctatactcaaaaatgaaaccgttttaatttagacttggaggttaagcttatgcaacctaatattcaatggttagatacaccagccgtattcagagtgggacaattgcctgcccacagtgatcaccgttactatgcgacactggccgaaatggcccaacaacagagttcgtttgaacaatctttgaatggcacgtggcaatttcactacagtgttaatgcggcgagtcgtcctaaatctttttatgaattagcatttgatgcgcaagattttgaaccaatcacagtaccccaacatatcgaattggcgggttatgagcaattgcactacatcaacacaatgtatccgtgggaagggcattattatcggcgtcccgctttttcaacgtccgatgataagcaacatcttggcatgtttagcgaagccgattataatcccgtcggttcatacctgcaccatttcgatttaaccccggccttaagaaatcaacgggtcatcattcgctttgaaggggtcgaacaagcgatgtatgtttggctaaacggtcaatttatcggctatgctgaagatagttttacaccgtccgaatttgacttaaccccgtatcttaaagaaactgataattgcttggcggttgaagtgcataagcgcagtagtgcggctttcatcgaagatcaagatttcttccgcttcttcgggattttccgggatgttaagttattggctaaaccccgcacgcatttggaagatttatgggtgattcccgaatatgatgtggcacaacaaacgggacaggtgaaacttcacctccaattttccggggatgaaaaccgagttcatctacgcattagggaccaacatcaaatcatcttaacggccgatttaacgagtggcgctcaggtgaacgacctttataagatgcccgaattggttcaagcgtggtccaaccaaacccctaacttatacacattagagctagaagttgtggatcaagctggggaaacgattgaaattagtcagcaaccatttggcttccgtaaaattgagattaaagataaagtgatgttgctcaacggaaaacggttagtcattaacggcgttaatcggcatgaatggcaccctgaaactggtcggacaattacggccgaagatgaagcgtgggatattgcctgcatgcagcgcaaccatatcaatgccgtccgaacatcgcattatccagatcggttatccttttataatggttgcgatcaagctggcatctatatgatggctgaaaccaatttggaatcgcatggttcttggcaaaaaatgggggcggtcgaaccttcttggaacgtcccaggttcatatgatgaatgggaagcggcgacgctcgatcgagcacgaaccaattttgaaacgtttaaaaatcacgtctcaattctcttttggtcattagggaatgaatcttacgctggtagtgttcttgagaagatgaacgcctattacaagcaacaagatccaacgcgcttagtgcattatgaaggggtcttccgggcgcccgagtataaggcgacgatttcggatgttgaaagtcggatgtatgcgacaccggctgagattaaggcttatttagataacgccccacaaaaaccatttattctctgcgaatatatgcatgatatggggaattcgctgggtggtatgcaatcgtatatcgacttattgtcacaatatgacatgtaccaaggcggctttatctgggatttcattgatcaagcactcttggtgacagatccagtgactggtcaacgtgaattacgctacggtggcgattttgatgaccgcccatcagactatgaattttcgggggatgggttagtctttgctacccgcgatgaaaaaccagcaatgcaggaggttagatactattatggcgaacacaaataaacgcttagcagtgatcttcggagatgtgactttaggacttaaaggccctgactttcactaccacttttcgtaccaaacgggtgggccagaatcattgcggattcaaggtaaagaatggctatatcgctcaccaaaaccgactttttggcgggcaactaccgataatgatcgcggcaaccaattcccattgaaatcgggaatgtggctagctgctgatcagttcattgcttgtcagtcgattacagtggcgattgacgggcaaacgattccgctgccaattgcgcccgagaacaaccgctatagtggtcaggaaacggcccaagaagtgacggttacgtatacctatcaaacaattacgacgccgcagacgacggtagaagtcagttatacgattcaagccagtggtaaaatccgtgtagcggtgacttatcatggtcaagctggattaccatcattaccagtctttggtttacgctttgtcatgccaaccccagcgacgcgctttatttatcaagggttgtcaggggaaacttatccagatcgaatggctggtgggatggctggtgagtacgaagtcaccgggctacctgtgacgccttatctggtgccacaagattgtggtgtgcacatggcaactgattgggtaacgatttatcggcaagcggttctggataatcgtttgcgcgaaccagtcgaaaccggcttgaagtttaagatggtcgatcaaccatttgccttttcatgtttgccatataccgctgaagaattggaaaatgcgacccatcattcagaactacccgcaccacaccgaacagtcttaaatctcttaggggccgttcgtggcgtgggcggtatcgatagttggggtagcgacgtagaagcggcctatcaaatagatgcgacgcaggatcgccattttgaatttgaaatttcgttttaaaaagtaaaaagagttgcggcaaaaatcatttttgccgcaactcttttttattgtaaagggctgtggcgggcgtcctgttttcaaatcagctataatagtaaataatatgttttattggtgggcaattgcctgggaaataatggtgaaatcgaggtaatgataatggaaactgaacaaatgataatttatttaacccgcctagagactgttttagatgatttagggaagctattgttcaaagcgcatttgaaggtgccacttaccttggatcgcgagcaatcacaagaactgttgcggcaaaataatcgttttgaatttaggtaccaacagctgcgaaatcaaaaaacaaagttattgaagcaattgctgaagttgacgagtggcgatatttatttacgccagaaaatcggtcagttgaacgaattgaatcagcaaagccaagcagcattggttgcggcaccagagtacaatcggcagcgcaaaattaatcgcctgcgtcagttaatcctgaacttacaaggtgaaaaaatcgaaaccagtatcgtcttatgtgaccaagtactggcttatttatacgaaaccgaaaaaaccgcgtttattgcgcactaccggccaaatgttgcgccggtggcggtgccttttttaagccgggatttcaagatggcgatgatgatgctcaactatatggatattatgttcacgccggttgagttacagcgccatattcgcttacttgtttatcgctacacccaagaatctgtggataatgtgttgatatacgatgcgcgaactattttaccgaatgccgagaaaacaggattctcagccgttgcgtattatttcaccttcaaacaacaaagtatgacctttatttcgtataaaggaacagaggggacgatggatgatccgcgaatcaaatcgtttcgtcagcgtttggataattatgtccgcgagagttatcaggactggaaatataatatcgacgcgatgttgattggtcacaccgataacgacgagcaactacaactagcacggcgtttcacccggtacgtggtccgacatgttaaaaagattgaagcaacgacacggatttatggcctcggccattcactgggcggtcattttgtccaaaccttgcagttattagatcaaccgtttaatgcgggttacaccttgaatgcggcaccggtccaattgaagcaaattaagcattatcgaccggatttatgtgatgacgcgacttggcaggtattgtttgaattaactaagcaaaatacgcaagataagaaaattgagcaactcctgcaggttaaaacgggcttacactatgccgaaattaataatgaatggtttatcaaggatttaacgcggatttattttggctttccgtatacgttctatattggaacggccaattatttgaacgcccgtaactggacctatccgtttgtggcggatattcgagagtatctcaaagatgatgagatgcaggcttatagtcaattctggggcaatctaattcattacctcaaacgagttgagaacaggaatggcacgattattttggcgagtttggtgacttacggactccaagcgctacgggaagtttacggtgccattaaaacaccagaagccaagcgcctttttagcgcttatgcgcgttatttatccgatgccaaaattttcaaagatacgccagtcgcggttcaggagaacttccaacgagaattatcgcgaccacaaacggctttacgtgtgctgcaaggtgagtggccatttttaagtagtgtgaataacgaaatggttgaaacggtgatttattttcataccattgaaggtgcccgttattttaaatctgtataaggttagtgacctattaaggggttaaaataaatggtattataaggatgaaactatattactcggggggaacaacatgttttgccaatattgtgggactaaaaatgaagcagattcacgattctgtattaattgtggcaagccactagaagacgctacagaacaaccagcaacgcaacaacctaaggaagatacggtgacacctaacaactcagctagtacgccccatgaaccggtggttagtcgtcaggcagttaaacaacaatcaaaatctaaaaagtgggtaccaatcctcattgggggcctagttgtgttagcaattgctgtgggggcaggcttttatttacaaaagccggcagcaaatactaaaatggcaacaagtgcttcttcaaaacaacaaagcacacaagcaagtgacagtgaaagtatcagtgattcagaagtatcatcaagtagttcggaatccgttgcaaatccgttatggaccgagtctaagaaggatagtctgcagagctttatggctgactggggcactgaaatggatcaggactaccaagaatatagcgaccatcataatgtctcgctgtatggtgttgatttacctggcgacttattatctggtgccattcaaaccgaagttggtgggagcccagtaactgttaaatggtctgaagatggtgtttcggccaaggcagattataaagttgtcgcagcttactcggatgccaacagtggtggtgaagaagatcatttttatctatttaccattcatgatggccgaccagtggtcttgattgcacaagaaggtcaagggagcacatcaagttcgattgcgtttaaggaaacagagaatacaacattgagaaatggattcagcgacataatcggaaactgaaagtgaggatgacagatggaaccgcgtagagaaaagtttagtaggcaaaagaatcaacgcttgggtcggaacatattagtagttgtgatcggcattattgtgattattgcggctggtattggtatcgcggtcgctaaaaatcgtcaaggtcaagctgctcaaagtcgcgctaaacaacaatcattggttgctcgcaaaaaggcccagtcaaaagccaaaaaggccgccgctaaccggtcacaaaaggcggttaaacaaacagccaaagcgactgaaaaacctaagaagcaaccaactgaaaaagcgttgacctttgatacacaaaatctaactgctaatgcgcaaaaggtcggttatgggatctactattacaacagtaagcgctcagtcggtagtaatcaggaccaaccttttatttcagctagtgtgattaagttattcatcatggattatctctatgaccagattaaacaaggtaagatttctggcggtcactatattgataaccattcagtcgatgaatggatccaattgatgattcaacagagtgataataacgcgaccaacttgttaattgattttgcgggaatgaccgaaatcaatcagtatatccaacaacaaggttatacacagactaagttagaacggaaaatgttagatgatgcagcccgtaatcaagggttggataactatacgtccgtgaaagacgtcttacaattcttgaaccaactctatcaaaatcgggatcaggcaccttacagtaagatgttgacgattatgaagggccaacaaacgcggactaaaatcccaagtcaattgccagctaatacggtcgttgctaacaagaccggcgagttagccgatgttgaaaatgatgtggggatcgtctttaaagataatgatccatttgcgattgttgtcttaacaaatcaagtccaaaatccggcagctgaacgccaagcaattggggcgttaagtttagcagcctttcaaaaataagtatgattaagagaacgttgtgataaatatcattttatcgcgaacgttcttttttgtttgaaaatgggcattagcgggcatagtcatgatagtcgttttagggtataataatatcggttataaactattgaaggttattgcacaatagctagggtgcatctagatcaggggattgatagccactaagcgttatttcggggggagtaatgccttagtgactgttcaattagatgaaccagtatgaagcaagagtatcggagacgattaattattgtaattatgagtgggcactcgtaattagacaggtatcaatatcaaaatgagactagggtcgttatcctagtctttttttgatgttgccaaatgggaacgatgctgatacgctaatgaaagcaaatcgtgtgaaatgaaggggatatattgtggatatttatttaaaacaggctatattacaagtggttgatcgcgaattaggcgcaccaatttattcccaacaaccgctggatttaaccaacggcaatacgcgggattatttaaccaataaaattaaaaaattatcgtcagcgcagagtaaaacaggcgtgattcgtcagggttctgaggttgctaaccaactattgaatatcgcctcagattttacaggtgtcagtcaacaacttgtggataagtggtatcaagcttaccaaaagagtgatgacgcgcccagtgccgatgtttttatcgccctttatgaacaggatacgcaggcttatgtcgcttttttgaaggttaattatcatgaagcttatacccactatgtgaatgctgaagagggaccgctaaccaatcagttaattattcaccaatcaattttatctaataagacgcaaaaagcagacgaagggtttgccatcaatctgcagaccttagggtttgaactaattgaaaaacaatataccttctctggagataaacggccatacctgtcaactgaagtcattgagagtgaaccgcaaccatccttggaagaaaatgtgcgggttgtgaagaaagccgccgaaaaaattggtgcgaaatttgaagtcgctaagcatgatattgtcgccaatgtgaaagaggcaatttacgaaacgattgaggcaaagggtgaaatcaatacgcaggatgttgcggccaaggtcttcaaggataatgtctcagcacaaacggaatttaaagcagcgatggttgaaaaggcgccagcggatgcgcccatttcacctgccgtgcgtgaaattgccgagaagaaatacggtaaacaaaaattaaaattatcaaatggaattgaattaatcgttccaattgacgtctatcaaaatccggacctatttgaatttatcaatcatccggatggaacaatgtcagttgaaatcaagaatgtcgacgaagtgattagtcgattatagaacatgtataaaaagggactgtacaaaagtaaatttgcacagtccctttttggcgcttatcgttttagtttaagtctgataatcttatcgcattccgtaataatcaggattaagaaaccagcgccaattgataccgcccattctaatagtgttagtggttctgtatagaatagtttttgcataaacggtacgtaagtcaaaatcaattggagaacaatcatgccagcgataatcccgaaggcttttggatttgagaagaaagcttttgaaaaggctaattttgttgttcggatgttgaagaggtagaagattttgctgatgacgatgatattgaccatcatcgtacttgcagtcacttgatcaacacctcggccgagtaaccagtcataggcccacaaggcaatcaacgccattaagaccgacacataggccatctggaagatgtcgtgtttgttcattaaggtttgacctgttttgcgtggggcccgcgccataatgccatcttcagcaggttcgaagatgaaggcaaattgaatcgtaattgccgaaaccatgttaatccagagtaactgagcagcttggagcggcattgattgttgcattaaaatcgtgaaggcgataattaaaccttcagcaaatgacgttggtaataagaagagaatactctttttgatattatcgtaaatacgccgtccttcttgaattgcgacggacatggtggcaaagttatcgttggttaaaatcatatccgcagaatccttagcaacatcggtccctttaatccccattgcaaccccaatatcagcacgttttaaagcaggcgcgtcattgacaccgtcaccggtcattgccgtcactttgtgttgtttttggagcgcttcgacgatttcgagtttgttgctaggagtggttcgagcgaaaacctgatgttcaaccgcggcaatttctttatcctcaggggataattgatcccattcagggccggtaatggttttgatgactggggccaaacctaacttttcaccaattgctttggcggtcaagggatgatcacccgtaatcattttgacatcgacaccggccgcattcatttcagccagtgcttgaatcacttcgtcacgaggcggatcgataatgccggctaagccgagcaaggtaatccctttgttaagaccttcatgcgtaatcgtcgttgttgatgctggtacgtcgaggtaaccgacagccacgacccgtttaccttgttcggagagtcgttgaacgtgttgattccaagtatctagtgggaaggcagcgtctttttgttgcgccatcgggaataatttatctggtgagcccttaatgtagaggcggcgttgaccagttgttgtttgaactaatttggcgatatagcggtaatcagaatcaaacggcaacatgtcaatttcggtattttgcggtacttgatcaatcgagaaacctttgtggtagaccgttaaaaaggcaccatcggttggttcaccgttaattgcccaaccctcatctgatttgaaaagggtggtgtcattggcttcaaaaccggcttctaagaatagggcgagagtgtcatcgataacagctggttgatcagcttgttgaatttgcccctcaggtgcataaccgttaccagaaacatggtagatttgatcggcggtaatgatatctttaaccgtcatttcatttttcgttaaagttccagttttatcagttgcaatcacatcaacggaacctaatgtttcaacagcgggtaaggttttaacgatcgcgtgtttatttttggccatgtcactaacacccatagctaaaataacagaggttgttgcagggagtccttccggaattgaaccaacaaccatcgtgacgatagcgatggcaagtaccggtaatgagtagaggccgctgatgaaacctaagatgaataacaagatggcagcggcaataatcacgtaagaaacaccggcccctaacttattaatctcgcgggtcagcggtgtggggcgactttgtgtatgcgtaactgcttttgaaatttgaccaatttcagtttgttcagcggtcgcgacaaccacgcccaagccactcccgtttgtaacggaggttgaggcaaacgccatgttaatttggtccgctaatgggacagttgttggtgtgagcgctgctgcttgtttatcgaccgaatcagcctcaccggtcagtgctgattcttcgaggcgcaagttatcggtatcgacaattcttaaatcggcagggatgctatcgccggcttctaagaagacgacatcaccaaccactaaatcttcggtgggaatatcgattcgttggccatcgcgataaacggttgcttcggtcgccaataaatccttaatgcgttcaagtgcatctgaggcgttggcttcttggtagtaaccgataatcgcattgatgatgaccactaaaccaataatgatggcatcagaatagtgacccatcagagttgtgagtagcgcagctgcaattaagatgtagataatcaggttattaaattggcgaatgaagagttgccatttaggtgtttttttactttctagtttgttagggccgtttgtggctaaacgtttttgtgcctcgacttgggaaaggccttgttcaaaatcatttcccgggtaatctttctgtaaatcctcaatcgattgattgtaagggttaatctgggttgtcattgttgatctcctttatattgaaattcataatagttaaaattaacgccattattcctttcgccaataaagattgctttttaagcaataacacgccgcagcgtcggggttatctttcaaaaacgttcacctcctgaatagtctctatatttaaattatcaagaaactgatgctgtgtcaatctaataaaaattattagcaatagctaagcaatacttttgtaattgtgcattcgatatggtagcataattgtataaatgaaaaaattcggttgaagcattgcgcattcaagatttccttctttagggtggtagaagggaattttagtgcgcttttttatggaggaaattagaaaatgtcaacattagcaattatcttaatcagtactttattagccggtcatctcagtaaacgaatcggtatgccggcggtgattggccagctgctcgtcgggattattctgggtccggcattgttaggtgtattacatgagaatagctttattcataccttttcagagattggtgtcgtcttattgatgtttacagccggtctcgagagtaacttaacgcttttgaagaagtacttcaaacccagtgtagttgtcgcaattttgggtgtgattgtgcctgtgggatcaatttacgcgatgagtttagcgtttggcatcaatcaattggagagtctatttattggtgttattttcgctgcgacttcagtatcgatttcggtcgaagttttgcgagaattaaaagtccttgagagtcgcgaaggtacgattattttaggggctgcagtcgttgatgatttattggcggtaatcattctaagcgtcttaacaagtctcttcggtgcgcaattagccaccgctgcgcctaatcagatgggacttgggctaacctttgccttacaaattgcctttttcgtagtggtttacttcagtgttaagtggttagtgccgggtgtgatgcgcttgagtcagcggttattggtgccttatgcaaatgcgattatgtcgttagtgatttgttttgtttttgtttggctagcagaagccgttgatttgagtacagttgtaggcgccttttttgcaggaattgcgatttcgcaaacaccatatcaatctgaaattagccgtcatattgaaccactgggctatacagtcttcattcctgtctttttcgttagcattgggttatcgatgacgtttgccgatttaaatcggcatttagtcttcattattgtactaaccgttttagccgtgttggcaaaattattaggcagtggctggggtgccaaaatgatgggtgtcccacaagcgggtgcctacacaattggggcagcgatgatttcgcggggagagatggcgttgattattgcgcaaatcggttatacagcgaagttattgagtgaaatgtattattcagcgattatcttcgtcattattttgacaacgattctagcaccgtttattttgaagtcagctatcaagaaacaattggcagcaactaaataatgctgctaagcgcataagaaaagattgtggaaaaatcataatgcgctataattagttatggaaacgatttcaaaaactggttaaagaggtgccattatggaagcagcggtcgcaaacaaagaacatacagttgatattattgataagaagttacgtccaattaaagccaatgaagcgctcgttaagatggaatactgcggtgtttgtcacaccgacttgcatgttaaaaatggtgattttggcgaagtacctggccgtgtcttagggcatgagggtgttggaattgttagtgaaattggctcagcggtaacgtcgttaaaagtcggcgatcgggtcagtgttgcttggttcttccaaggctgtgggcattgtgattattgtgtgaatggtcaagaaacattctgtcgccaagcgcaaaatgcaggctatacggttgatggtgggatggctgaagaatgtatcgtcaccgctgattacgcagtgaaagtccctgaagatttggatccaattgcggccagcagtattacttgtgctggtgtcacaacttacaaagcaattaaggtttcagacatcaaaccaggtcaatggttggttatttttgggatggggggcttaggcaacttagcgcttcaatatgccaagaatgtcttcaatgctaaagtgattgcagtggatattaatgatgacaagttagcaattgctaaggaattaggtgctgatgttatcattaatggcaagcaagaagatgtggtagcccgggttaaagaagtaactggcgatggcgcccacgcaactgtgattacggctgtttctaaggtcgctttcaaccaagctgtagatgctgtgcgtgcaacgggcaaagtggtggctgttggattgcctgttgaaacgatggatctttcaattccaagattagtattagatgggattgaagtcatcggctcacttgttgggacacgggctgatttagcggaagcttttgagtttgctgcagaaggcgcagtgacaccaattgttcaaaccagacccttggcagatatcaatgatattatgactgaaatggctgaaggtaagatttcaggccgaatggtgattgattttacaaaataaacttaaaaataaaatgaggcgttgggctaaaggcaacttttagcccaatgctttttttgttgacaaattttaaaaatagccgtacacttacgtagtaataaaaacatgtaattaattacatgataacgcggaggtaattttaatgacaaaacaatttaaagaattagaagactttttaggcacacactttatttacacgtatgataatggttggaagtacgaatggtatgctaaaaatgaccataccgttgactaccgaattcatggtgggatggttgcaggccgttgggttcgcaatcaagaagccaatatcgttaaattaacggacggtgtcttcaagattacttggactgaaccaactgggacagatgttgctttggacttcatgcctaacgaaaacaagttacacggtacaatcttcttccctaaatgggttgaagaacatccagaaattacggtcacttatcaaaacgaccatatcgcattgatggaagaatcacgtgaaaaatacgaaacatatcctaagttattggtacctgaattcgctacaattacttacatgggtgatgctggtcaaaacaatgaagatgttattagccaagcaccatacgaaggtatgattgaagatattcaagaaggtcgttacttcgatgaaaattacaagaaggttaatcgttaagctaatttagtttcctatcaaaaccaatcattagcataagttaatatttgattaaaggaagcggttacggtataatgtaattgtagtcaaataatctaacgaggtggatgatagatgacgattaatgtaggtgacttggtacgatgccaagccaatgaaatgatgacggaaccttatttagggaaggtcttggagaagtgcgaagagactgtgcacgtcttaattttgaattatatgccgaatgatcgtttcatcgtccatgaattaatgcaacaaattatcgtgaattcacagcaaatataccgaatttcgttaacgagagttgccggttagctatcaacctaaacgattttcctcctattagtaatgcccagatgtgttcttagacatctgggcatgtttcatgttaaagtgagttttggaaaacgcttcataaaaaaagaccgctaaattggcgtttttttttaaacttggatagggacaagtcaattcggatgtgatagaataatgaaggattatttgagcagtggggacgaccaaagttagggcatcctaaaatcaaagtcattgaatcctaatagttgaataactcaatcgaagagaaagaggtacttatatggataagaaacagcgagaagattcacaaaagcatgagaaatttattcattatgctgatggtagtagtctagaagaaattaacaacaccgttgcgatccctaagaacgctggtttctggaaaaccttgatggctttcatgggacccggtgcgttagttgcggttggttacatggatccaggtaactggattacatcaattgccggtggggcacaatttgcttacaccttgatcagtgttattttagtatcgaacttaattgccatgctattacaagcaatggcggcacgtttaggaattgttaccgggatggatttagcgcagatgacgcgtgccaaaaccggtaaaaagatggggattttcctgtggattgtcacagaattagccattatggcgactgatattgcagaaattattggttccgccattgcgttagaattaatctttaatattccattattatggggtgtcttaatcaccgcattcgatgtcttgctcctattattattgatgaaacttggcttccggaaaattgaagcgattgtagcaaccttagtggctgttatcttattcgtcttcttatacgaagtaatcttggcacaacctaacatgggtgatgttgtgcgtggatttgtaccaagcccaagaattataactgacaagaagatgttgttcttggcattagggattgttggtgcaactgttatgccacataacttgtacttacattcttcaattgcgcaagcacgtcaatacgatcgtgatgatgttgctgaaaaacgtaaagcaatcaagtttacagtaatcgattcaaacatccaattaacaatcgcttttgtcgttaactgtttactattaatccttggtgcagcaatgttctatggtactaacagtgatttaggtcgttttgttgatttatttaacgctttacaaaacaaagaaattgttgggagtattgctagcccaatgttgagtttactttttgctgttgccttattggcatcaggtcaaaactcaacgattacagggacgctttcaggacaaattgtcatggaaggtttcgtccgcatgaagattccattgtgggcacgtcgggtcattacacgtgggttatcaatcttaccagtgattatcttcacggtttattaccatgggaatgaagctcaagttgaaaacctcttgatttactcacaggtcttcttgagtatcgcattgccagtttcaatgattccattgacgatgtttactagtgatgaaaaaatcatgggaccattcgttaaccgcccttgggtgaaatatacggcttggttcgtaacaattgtcttaacattattgaatatctatttaatcttacaaacagtgggcctagcagcctaatgaaataagcgattagcttggccgatatcagaggcagctaatcgcttttttgattgctgttcagtaggtgtgctagactagaaagaagttattattctggagggatgatattttgtttgaagtaacaacagtccatattatgattcggttgaccctagcgaccgtaatcgctgggattattggctccgatcgggagtataaaaatcgtccggctgggattcggacgcatattctggtctgcttgggggcctgtgtcattgcgatgattcaacaagaaattgctgctcaaaatgtgcaatttgcgctacaccatttagcgattgccaccacgattcgttctgatcaggcgcgtttgattgcgcaagtggtcagtgggattgggttcttaggggccgggacgattgtcgtaacccgccataagattcaagggctaacaacggcagcctcgttatgggcgacagctggcattggcttagcaattgggatgggctattaccaaattgccgttattagtgccgttttcgtcatttttgtgattgtctttttaaagaaaattattcatatcaatacgttgaagaaaattgaaattaaatacaaacacaaactagagaccaaggaatttatccaaacttattttgaagaacaccatattcagattcgggatgtgaacttctcagtgacccaaaatgaacgggacacaatatacaccaacgtttatcgaatcgaaattccacgagagatgcaatattcagaaattgtggaagacatctcgatgaataagaatattatgacgattagaatggtcagcatttaactgaaagtattgaaaaagagattgggataaattcatttttgtcccaatctttttttgtttttaaatagtggttaagggcgttgctgtataaaaataatgaatatatgaataaaaacgattacttagcattctttattcatataagattgacattatactggtagaattgtatatttattctaacttagaccaacaaaaaggacttgtgtatattatggagaaatcaaagaagattaatgtcaatggcttaatcttgatgatctttggatcaatttttggctttgcgaataccaccattgccttttatttaatgggctatgccagtattatctggtatatcctagcagctatctttttctttttaccaacctcattgatgtttgccgaatacggttcatcattgaaagaagcgcgtgggggcctttattcatggcttgaagcgtcaattggtaagaaggcagcctttatcggaacgttcatctggttagcctcatggattgtttggatggtatcgaccgctgcgaaagtgtggattccattttcaactttcttacaaggatcagaccaaacaacaacttggcattttatcgggttaaacgggactcaagtcgtcggtgttttaggcgtgctttggattttagcgttaaccttcctatcaagccgtgggattgataagattcagaagtttgcttctttcagtgggatggctgtggcctttttattcgcagctttcttagtaatcagtcttgcaatctggttcaagacaggctttaagcttgccgaaccaattcacggtgtgacaactttcgttaagagtccaatggcttcttatcaatcaccaatcgggatgttgtcattcgttgtcttttcaatcttcgcttatgcggggatggaaacaatgggtggcgtgacggatagtatggatcatccagaaaagactttccctaagggtttaatgattgcgacagccttcattaccttaatctacgccattgcaatcttcatgtggggcatttcaacgaactggcaccaagttttaggtggcgataaagccaacatggggaatatcacgtacgtcttgatgcaaaacttaggttatcaatttggacatgcgtttggtatgtcaacgacagccgctgttggtatcggtacgttatttgctcgaatcaccggattaatcatgtttatcagttaccttggggcatttgccgtcctcatttattcaccattaaaatcattcgtactgggaacacccaaagcattatggccaaaaggctttgctgaagtcaataaacacgggatgcctgaaaaggcaatgtgggcacaagctgttttggtttgtttattaattgctgttatctcatttggtggtaaagctgccagcgaattctacaacgtattaaccttgatgtcgaacgtttcaacatcattaccttatctcttcttagtgactgccttcccttactttaaggcgcgcaaagatttagagcgcccttacgagttcttcaagactaaagcatcagtgcaagctgtgacaattgttgtcgatttagtcttagtcttcgggattgccttcacgattgtgcaaccgatgctagaaggtagctatatggatgctttctggatggtcatcgggccaatcgtctttgcaattatggcgatcgcactctatcaccgttatcaaaagaaagttgcttaaaacgttatcaaaaacaggtcctcatcagagggcctgttttttttggttctcggcaaattcggagagaaaataattgcaattctcattacattttaataatgaaaataaaatagttgcattttaaaaataagttttataagtgacttttaaattttctaaggtgcaagcgattgggaagcaagagatgtttaaatttgtttaaaaaagctgtcaatagtgttaagaatgagaaaatgatgagaaggctatctagcgatatgcaacctgttcaataaactagtatactttttaggtatagttttcagaaaaatttatatcaaagggggattctatgactgtcaaattacaagtcaaagatttaacgaagatatttggtaagcgggtgccgcgggccaaagaactattgaagcaaggtaagagtaaggctgagattctaaaggaaacaggtgcgacaatcggtgtcgaccgggctaactttgaagtcgaatctggcgaaatattcgttattatgggactatctggtagtggtaaatcaacattggtgcggatgattaaccgattgatcgaaccaactgaaggtagtgtgttgatagataacgaggatttaatgcagattgataagaaagaattacttgaagtccggcgcaagaaaatgagcatggtctttcagaatttcggacttttcccaaaccgcacaatcctagacaacacttcttatggattagaaattcaagggattgataaacaaacgcgcgatcaaaaagctaatgaagcgttagatctcgttggtttaaacggttatggggaacaatatccaacacaattatctggtgggatgcaacaacgggttggtttagcacgtgctttagccaatgacccagaaatcctattaatggatgaagctttctcagcgttagatccattgaaccgttcagatatgcaagatcaattacttgatttacaagaaacaatgcacaaaacaattatctttattagtcatgatttaaacgaagccctcaaaatcggcgatcacatcatgattatgaaggatggcgaaattgttcaaactggaacaccggaagatattttaacgcgtccagctgatgaatatgttgagaaatttatcgaaaatgtcgatcgtagtaaggtttatacggccggcaacgttatgattcgtccaacaacggttaatatcgaaaaagatggcccacgtttggccttgaaacgtatgcgtgaaaatgaagtttcaaccgtttatgttgtgaataacaagcgtgaattggtcgggattatcgatgcgcgggatgttttagaattagttcgtaaggaaagtcgggatcttcagtccgttgttaatgcaaacgtaccgacaaccactgaagaaacaccgattgcggatattctagatgatatttcacaaaccgggattccatttgccgtcttaaatgagaaaaaacaattacgtgggatcatcattcgcggtgccgtcttaggcgcacttgcaggaaacgaggtgaaccattttgcttaatttaatgacaattcctaaattaccacttgctagttggatggacagttttgtcgattggctaacacaatttacaggtttctttaatggtttaacaaactttatcggtgggattatcaatggctttcaatgggtctttgatttaattccgatctggttatttatcgtgattatcgcgggtgtcacttacttcgccaatcgcgatacgaagaagtggggcttaatcctttttgaagtggccggccttcttttaatctggaacttagatttctggcgggatatgacacaaacgttaacccttgtgttgacgtctagtttaatctcattagtgattggtgtgccacttgggatttggatggctaaaagtgatattgcccaggcaatatttaaaccaattcttgatttcatgcagaccatgccagcctttgtttacttgattccagcggttgcctttttcggcattgggatggtgcccggcgttttcgcgtcagtgatttttgccatgccaccaacggttcgaatgactaacctagggattcgccaagtgccaaccgaattaattgaagccgcagattcttacggttcaacagaatggcagaaattgattaaagtgcaattaccactcgccaaatcaaccttaatggccggggttaaccaaagtatgatgttagctttatcaatggtcgttattgcttcaatgatcggtgcaatgggtcttggaacccgggtttacttcgccgtaggtcggaacgatgctgggggcggttttgcagccggcttggcaatcgttattttagcgattatcattgatcgtttgacacaagcactaaacagacaacgacaacattaaggagggatttagtgattaagaagaataaattaatagcttttttcaccttaattggattagtaacgttgcttagtgcctgtagctcacaaactaagccttatgatgctaagcaaaagttaggcccacaaatcaactacacgattactgggattgatgccggagctggtattatggcttcaacgcaaaaggctttatcaacgtatcatttggaaggtcaaaactggcagttacaaaccagttcaaccgctgcaatgaccagtactttggacaaagcgattgctgacaagcgtccaatcgtgattactggttggcaaccacattggatgtttactaaatatccaatcaagtttttgaaggatcctaaaaatgtctttggccaggctgaacatatcgatacgattgttcgaaaaggccttaaaaaagatatgccagaagcttataccatccttgaccggttccactggacaccagcggaaatgtcaaaagtgatgttacaagttaatgatggcgtcgatccagaaaaggctgctaaagattggattaaagctaatcccaaacaagttgctaaatggaccaagggtgttaaaaaagttcatggtacgaaaattaagttaacttatgtcgcttgggattctgaaattgcttcaaccaacgttgttgcggaagtacttcgtcaacaaggttatgaaccaacaattcaggcaatggaaatccaaccaatgtgggcatcagtcgcaactaaagcggccgatgcacaggttgctgcttggttaccaaagacatctggtttgtactacaaggattaccaaggtaagtttgaagacttaggtcctaacttagaaggtgccaaagttggcttagctgtgccgaagtacatgactaacgtgaactcaattgaggatttaaaaacgaaataaacaaaaaataggtgttatcagtcatcgatagttgatgattgaaaaaggcgttgtcgcaaaagtaatcttttgtcgcaacgcttttttattttggaaaagggcttgattgtatatacaattttgtttatactacaattattaaaacgcttacaatttggagatgaacgattatgacgtatgcaatgattgggacatggcgaatggcttatgaaggattatccaaagcgatgacgacgctcgaagcgggcggcaaaagtacagatgcaattgaaatcgctatcaaagaagtcgaagattatccattttttaaatcggttggctacggtggtttaccgaatgcacaaggtttagttgaaatggatgcggcctttatggatggcaatacgtttgcgattggggcggttgcggggattagcgatgttaaaaatcccatctcggttgcacgccaattgagtaacgatcattttaatagttttctggtaggtgctggcgcatcacaatatgcgatgttcaacggttttgaagcacgcaacatgttaacagagcgcgcgcataagttgtgggccaaacgcgttcaggaaattaacgaaaaaaatcttagtccgtatgacggtcacgatacggttggcatggtgagcttggatcaagatgctggtatggcagcaggaacttcgacttctggtttgttcatgaaaaaaccagggcgcacaggcgattcagcgttatccggcagtggcttttatgtggatagcgacatcggtggcgccaccgcaacgggtttaggcgaagatttgatgaagggctgtctttcttacgaaattgtccgcttgatgggttcgggattatcgccgcaagcggcttgtgatcaagccgtttatccatttgttgaaaaacttaagaaacgctacggcaaggtgggggaattctcactgattgcattgaataatcaaggtgaatggggcgtggccaccaatgttgaattcacttttgcagccgggaatgatgaacagacaccgcaaatttatatggctaatccagggccggatcagaccactattattgaaccaatttccgaagcttggttaatagcttacgaaaaacgaattaaggccccaattgattagaaggagtatttagaaaatggcgaagtatctatatgtcgaaattgcagaagcgttaaacgaagatgtccgggcgggaatctatggtgtccatcaaaaattaccgtcagaaacggacttagccgcgcagtttgcgacgacgcggttaacaatccgcaaggcaatcgacttactcgaaaaacaacaggttgtggtccgtgatcggaatcgcgggacctatgttttagcgaccgaaggcaaaatttctagtggggccagcggtttagtgggttttaccgaagccgccaaggaattacacttggacgcgagcactcgggtgttagatttgcgccgcgcaattgtctatccagactacgttgcgtctaaattacaactcaacgagcaagaaccggtttggcagattgaacgcatccggatggctgataacgaaccaatgacgcacgaacagatttaccttaaacaaagaatactccccaacttgacggcccacgaagcgcaaggctctctctaccgtttgattgaacaagagatgccaattggttatgcgcaacaagaattagaagccgttatcttagaaccggggttaagcgaattactagaaacaacaccaggacagcccgccttcttggcgcacacggtcgcctattcaatggatggctacccaatcttttacgataattcccattatcgggctgacaagtatacgttccacaatattttgagtcgtaaacattaatgttagaaggaggtattgttcattagcaggcaggtaagacaaaactttaatctggaggattaaacatgtttgataaattagaaaaattcttgatgccgttagcgataaaactggggagcaataaagttttaatcgctattcgggatggctttttaatcacaacacctttaattattgtcgcttcaattttcctattaattgctaattttccaattccacattggtctgaattctggggtcaattcttagggactggttgggaaagttggttcactaacgtttcgcgtgctgtctttaatacagttggcttcttcacctgttttagtacggcttacgcttacggcaaacaaaaaaatacggatgcaatccaagcagccgcagttgctttggtagcctttttaatcctaacaccaactaaaatggttgttgaaaatctaaaggaacccgttgatggggctttagatatgaactaccttggcacaaatgggattttcttgggactagttgttgcacttgttgcagtacccatttattgttatgtgactgaaaaagggtggacgattaaaatgcctgatggcgtaccacctgcagtatcgcaatcatttgaagcgttaattccaagtgcagttgtcatgttagtctttttcgcaattcgcattatttttgggttaacaccatacgaaacactgtataatttcatcttcgaaatcttacaagtgccattaaaaggggccggcaatactttaactgcccagattatctacggatttgcctgcacaatcttctggttctttggcattaatggaccagcagttgctaattctgtttttgcaccaatttctaaagtgttaacaatggaaaacttggatgctttccaagcacataaggcattgcctaacatttttactgacccattctcaaacttctttactaacttcggtggtggcgggagtaccttatcactattaatcgtgatgcttttattctgtcgctcacaacgaattaaacaacttgggaagttggctattttacctgggattttcggcattaacgaaccaatcatctttgggttgccaattgtgttgaatccgattctcatcattccatttaacttagtaccacttatcaacctcttgctatcaacgatggtaacaaaatgggggctgattccatataccaatggggtggccttaccatggacaacaccaatcggtttttccggctacctttcaaccgggagcatcgtggcctcactctaccaatttgcattattagcattgggttgcttaatttactacccattcattaagactttggataaacaatacatcaaagaagaacaagacgcagagatggctaaagcggaagatatttcatttgatgatttaacggaagcagacttgaatttgtaaaggtggagaatagtcatggaaattttaattttattagatcaaattcaagcaggtttaggcggtaccgaacgtggtgatttacccttaggcggtaaaaaaatggcgatgggttctgccgatatgtttgaaaagtatttagaaaaggacgaaaaaatcgcggtgaccttatattgtggtgatcaaaatttcatggatcataaagatgaggtcagcttgaagttggcagcgatgattaaaaagttgcatccagatgttgttatttgtgggccagcttttcattatgaacaatacgctgaaatgtgtgcccaaactggggctttagtgaccgaaaaaactgatattccagttgtggctgcgatgtctaaagaatgccagtcagtaattgatcaatatcgccaacgtgttgatattgttaagatgcctaaaaaaggtgggactggcttgagtgatgctttaaaagatatcttggcactctgccggataaaagctaatcacggtgatatttctgagtttccaagcgataaaatctattaactgtgggtgatgaaatgctaaatcaagaaacaatcgacctgatgcaggcactaaccgatattaacggggttgctagcaatgaacggttagttgcggcgcgtttaaaacaggattatgcgcaactagcggatgaagtgatttacgataacttaggatcgatttatgcggttaaaaagagtcaaacaccaaatgcgccgcatgtgatggtttcggggcatatggacgaggttggtctaatcgtgactaaagtgttagataatggcttattgcaagctttattactcggcgacatgtcaactaatagcttgttaggcgccagtgtccaaggcgattttgctgggaaaaattatcaaggcactattttagcacaaacggaaaataatcaagttgttgataaaacgaataaagtgcaagtcgaccttggctttttaagtaaagcagcagttgaaaaggctggtgtgcagttaggtgatacgctcagttttgcaacatcatttgttcaaactgaaagtggcgctttgatgagtcgcaattggaatggtcgctatgcacctattctaggggttgaattattacaagccttgcaaaatgttgaactaccatttgatttatatgtgggatgcacagttcaggaacaagtgggtttacgaggaattcagacggcgacgaataaagtagcgcctgatttagcaattatgttagatacagatgccgcttttgattatcaaactgattctgatgaccgaataggggtgttaggggatggcgttttattgaattactatgacaaaacggttttacctaatcggttattactccaaactttccgtgaaacttgtgaacaagatcaaattccttatcaatattactattcattggccgattctgaagcaggttgggtgaataagttacggacgggttgtccaacccttttcgtgaatattccggttagaaatatgaatacgccacgctcggtaattgctgctgctgattatcaagctgctaaggcgggattgattcaatttattaaacaaatcgataatgatagtcttcaagcgtttaaagcagaaaatcgataagttggtgaaaacatggtagaagagacaatcgatatagatttattacgccggctcagtgaagccgacggcattggcggtcgtgaacgtgaagtgagtcagctagtgcatgactacgcccaaccatatgtagatgaaattagttatgataacttagggtcaattattctaaagcaaaatggtacggcaaatgaagggcctaaagtcatgttgtcagcacatatggacgaagtgggttttgtggttcgtcaaattacaccagagggttatcttaagttattaccagttggtggttggtggggacacgtgatgcctgctcaagaaatgactgtcacaacagcaactgggcaaaaatatattggtattgtgggcagtcgggcgccacatggtttacctgatgaggttaagaataaggtgatgacgccaatgacgatgtttttggatatgggtgtcgctgatcgtcaggcaatcgaagcgttagggattcgtattggggatatgattacgccgtatattccgtttaggcaaatgaatgatcctaacttcttagctgggaaagcatgggatgatcgttttagtttgggtgcggagctagaagtaatgaaacgaacagcgcaaaagccgcatgaagcaacgctctttttcacaggttcgacacaagaagaagtagggattcgtggtgcacggacagcggttcatcagattcaaccagatttagcaattgcactcgatgtcacaacagctaaggacacgccactcgataatgaaagcagtaatcgattaggtggtggggttgtcttagcggtactagattctttaacgatggctaacaaagggttgttgtaccgaatggaacgtcttgttgccgatttaaaattagatgtgcggtatgactttatgaccgttggtgggactgatgcttgtaatattcataaggcgatggatggtgtcgtgacaatgacgatttcgatgccaacccgctatatgcattcaccacggttgatggttcatcaagatgattacaaacaaacgattcagttattgacctcgttttgtcagtcactatcgaaggctgacgttgcactgtttaaagaagcgacgcgtcaagctttagaaaagacgtattaaaccatagaaagaagccatttttgtgaaagcgattcgagcggattttaaagctttatttgaacaatatgaagcagaatttttggccgatttgaaggctgttttgcgggtaccgagtgttcgtggcgttaaaacgtatcaagcaccatttgggattgggcctaagcgggcattggaaacggtgttgtctattgcgacgcgaatgggcttcagaactgggcaagtcggtgattgtgttggctgggctgaatatgggccggatgaaagccaagcaccaacctattttggcatcttgggtcatttggatgtagtcgacgttgagaatgattggcattatccaccgtttgaccttacccaagtggataacttcttgtatggacgtggtgttttggataataaagggccactcttatccacattgtttgcactttatctgattaaaacgcaaaaaataacatttaagcaccgggttcggattatttttggcacggatgaagaatcagggagccaagatattccggtgtatctacaacaagaagcagcgccgtacgccggttttacgccagattgcaagtttccggccgtttacggggaacgtggtttgttagacgttcagttatcgttgccgattacagatggctctgagcgccaaattacagcgattgacgggccgtttgccaaaagttatttaccagatcacgctcgcctacttttagcggatgggacggtcaaaacttatcaaggcaaaaaggcgccaagtaacgcacctgaaatggcggataatgtgctgccgaaattagtagcagatgctagccaattgacgggccagaccggccaattctatcagtggcttaatgctaaaattggtaatcaatcaactggggaaaacttggggataaattttgaagatgcggcctcgggtgctttgcagttagccttttacggattatcgattgagtcgcaacagttgagttgtcatctaacgtgtcgttatccgatttcggtgactgaagaacaattgttagccggcatcgaagcggcgttgttaccggggatgacggtgacggttaagcggcggtatccatcgcaagtgaccgatccgcaattgccatttattcaacaattatcggcgatttatgcggctgatgcgggcttagatggcacaccggtgacgacgaccggggtgacttacgcccgcgctttgccgaatatcatcgcgtttgggccttctttcccaggacaaaagggcatcgcgcataagggtgatgaatggcttcaattcagcgattggcaaatgatgatgcaaatttattacgatagtttgttagttgttgggacacaggattagaacaaatcaaaaaggccaggacaatttgtcctgacctttttaatttgtttagcgacttgctaatgcgcccattggatcccatggtgcgagaacggttgggtgatcgtattcttctttttcaatccgttgcatttctggtgttaagaagcgtttgttgataacgatttggtagacgaattcgtcaaaccagctgtcgctcatgacgaagtagcccttagtaccgactttatcgccccatgagttttcaaccttccatttcgttggttggccatcaacgatatcaacgccagtaatgaccatcgcatgcgtcattaaactttcaccgtaatctaggcgttcacctttagaaattgaaaggtccatgttaagtaatgctgctttttgatagattttagtatccatgataccaagtttgcggtcggatgattggccaacgtcgctaccaaaccaaactgattcgccagcttggagttgtttgatggcgagttgtttaaaatcatcgatatcaagattcaaatggcgaacttcacggccgccaaccacgttgccgagcatttcaacgctgtataagtgattgtatggtttgtccgccgttggagaattgattaatgaaacataattttcgaggtcccaaccaacatatttttggtagaaggtttgtggtgtgaggcctttttcaatgtggtagttatggtcatcatcgcgatattcgaagtcgaattcaacgggtggttcgcccaatgcgaaaacaagcatccggtaaacttcggtcaacattgtatctttctttgcttggatatcggcttcgctgacaccatcggcaaccagttgacgaagtgtgacggcatcttttctaagtttaaggttcaagacgctgttgagttcgcttgatttttcactgttataagtttcgggcatgaccgacttaggtacaatcccgtatttttcgatgagggcgcataacatatcccattgaccgccgtcttgttgtggcgtagtcattaaaaagtcgactttgcgatcgccgattggttgatcggctgtctttaagacattttcgtagaagtagtttgatttctcaaatttatcccagaagttagtgtaattttgtgaaagctcgaaatctttaatcttgaattgtgcttgtaagctgtggcgcatcgtatttaatgcggcaaacatccagcaacgaccggattgcttttgatttgaaacggcaccagtgtctaaatcgattgaaaagactgggtccattaaagcctttgaagttgtattttgactgctggctaaaaagccgctgttcatcaccgtgtttttgatgacgtttgattgtggaactgccttgaagtcggctttgaattgttggatatcttttgctgtaatgggttgaaccatatgaaaaacctcctctggaatttggtgataatagattgatgattgaatatataacttggattaacgtgcttgaacgcactcgtttctttaacgtgctttttgaaactgactcctgcgcttaaccatatttgtcaaatcagcgattgcatcgccaattcgtcaagtgctgtaagtgctcagaagttacccgttgatgacgcactctattgtagtgcgtcccatgggtctagtttgattggggtttggtctagtagggcttgttcttcttttgtgaggtattccttcttaataaccacttcgtatacatagtcatcaaaccaagcgtcgctcatgctgaagtagcccttattgccgaccttgtcactccaagtgttttcaactttccattttgtgggttggtcgtcgactaggttgacaccggttaaagtcatcgcgtgggaaacaacgccttgacgataatcgagtcgttggtctttaggcattgttaaatcaatactgaagagacttgagtagtcataaagattactgtccaaccaacctttttggcggtctaagtcggcgagcacgtcgttaccaaaccaaattggttcaccagctttaagtgattgaatggcgagtgcttttagacgatcgggtgggaggttcaataggcgcattggatggccttcaactacggtatcttgtgagtctaagctgtaaagttggttgtattgtttgcttgcttgtgggctgctgacaactgtgacgtaatcatcaaaattgcgattcaaatatttttgatagaagctcagtggtgtgaggccttggtcaaggtgatattgttgatcattatcgcgataggcgaagtcgaatgtttcaacgggttcgccaaaagcgtaaacgctgagacggtaaatttcgcttaacatcgccgttctagtttcgctaatcttgtcagaaggtgcttgattggcaactaattggcggagtttaatcgcatctgtccgtaatttaaggtttagagtactgttgaattcagtggttaaatcactgttgtatgtttcaggcatgacggacttgggaacggcaccgtatttttggattaatgcgactgcattgtcccattggccgccgtcaaaatcaggtccggcaagtgcgaaggcgacttcgcgatccgtaatgggtttagtagctgttgctaggattttttcgtagaaaagattggctttttcaatgcgatcccagaatgagaggtagttttgagaaagttcaaagtttttcacgttatattgttgttcgaaatcatgacgaagtgtattgagtgtggcaaatagccaacaacgaccactctttttttggaagctgacatcaccggttggcaagtctatcgagtaggttgggtcaagggttacggcagcatcagggcgctgagcgaccgcgttaatcccgttattcatgacggcattacgtagtgtttgggcttgcggcatgtcggcgagtgcttggcgcatcttgattaaattagcatgtgtaatttcttgggtcatctaatcactccttaatttcaatataccctaattctagttgatttaatgggagaagtaaacatgagatagatgggataatgatattattgaaaagttaaaaatgaggaagaaaacggttaatatgagaattgatttgtgacgttaaagataaaaaaataaccatcataacgagtatgatggttattgggggattggcataatctagtcacttgaagagtaggctatccaaaacgtgccatatcaacctgattcttgcgtttagctacgtcccgcaaataatcgactgcgtcgcttattcactggcctaggcaaatgctcagaatctaaacacttgcaagggcactctgggttgaaacgtgctattcaaagtgtgttcctgcgtttagcgccgtatcgcaaacaatcgactgtgtcgcttattcacgatactatgctaatcctcagaacataaccactttgaagggcactctgtttttatcttgcttttaagattttgacgccttctggtgagcctactacgacttcgttgacgaggtctaagaataggccgtgttcaacgacgccgacttgttcgcttaaccaagttgctagtaagtggggatgtgtgattttttcaaggtgcagatcaatcacttcattttttgaatccgttaagacgcgttggccgtcttcggttgttctgaattctgggttgaggccttctttaacgaacttgttgaaaacttgttgactgccaaaaggaatcacttcaacggggagtgggaagcggccgattgtatcgactactttttcttcatcaacaatccagatgttgcgggttgaggttgttgccactagtttttcaaataagtgggcagcgccaccgcctttaatcccttggaagttatcatcaacttcatcggcaccatcaattgttaaatcgatatgatcgacttcgttgagcgctttaaccgggatgccgagcgatgttgcttgttctgcggttctgattgatgtgcagacgcaagttaggtggaggttttcggctttcacacgtttagcgagtgcttcgaccatgtacacgacagttgagccagtcccgagtcctaaaatcatattatcttcgacgtagtccactgaacgttcagcggccatttttttcattgcattcttatccattaagacacctcttctattgttaatagttctattatacgcaataactggtaaaaaagcgctttaaaatgggcgttttttgctaaaatttctattaaatcggtcggaaggattattcaagtccgttggttttcatggtatgatacagtagtaaaaaatagcgccaaattaggtgttaatatataggagcttttttagatgaaaaaacgaggattcgaaatagtaaccaaataccaatcagcaaacttaagtttaccagtgcggtcgactgctcattcagcaggatacgattttgcttgtgcagaggacttcgttttaccatccatctggcattataattttgtccgtctatttcggatgattcgaaacggcaaaccactagttgatgatgattttgaacgggcttctaagacgttgaaacctttcctagtaccaactgggattaaggcgtatatgcaagacgacgaatatttaatgattgccaatcgttcaagcaatcccttgaaaaaagggttagtgattccaaatggtgtcgggattattgattcagattattatggcaatgatgccaacgaaggtgaaatcttcattcaaatgttaaacttcagcccacgcgatgttattttacgtaagggtgaacgaattggccaaggcattttcatgccataccttgtagctgatgatgaagtggctgtgacaactaaacggaccggtggctttggttcatctggtcgctagtccgtgctaacggcaatcgatcgccgatatgtgctaaaatagtagacaataagggtagtaaaggagaatcttgtggctaaagttaaaacgcagtttgtctgccagaattgtggctatagttcccccagattcttggggcgctgtccgaattgtggtgcttggaaccaaatggttgaagaacgtgaacaaccagccgcagcggcaaaatcaaatttcacaatttcagggcgcgccactgaacctgaaaaaattagtactgttaatatccaaaaagaaccccgtgttaaaacggaattaaatgaattgaatcgtgttttaggtggcggcgttgttccgggttcactgattttaatcggtggggatcctgggattggaaaatcaaccttgctactacaagtttcagggcaacttgaaaaagtgggtaagatcctatacgtttcaggtgaagaaagtgcctcacaaattaagatgcgggcgaatcgattaggggttaatggcgatcaattgtatctgtatcccgaaacggatatgggtaatattcgccaccaaattgaaacgctcaaaccagaatacgtcgtgattgattcgattcaaacgatgagtgaaccagaagtgacttccgcagtcgggagtgtttcgcaagttcgccaagtaaccgcagaattgatgcggattgctaaaacgaatcaaattaccatcttcgtggtgggacatgtgacgaaggaaggggcgattgccggccctaagattttggaacatatggtagataccgtgttgtactttgaaggtgacacccatcacacttaccggattttacgatctgttaaaaaccggtttggttcaaccaatgaaatcgggattttcgaaatgcgggaagcgggcttgcaagaagtcgctaatccatccgaaattttccttgaagaacgactagccggtgcgactggctcagcagttgtggtttcaatggaagggacaagaccaatcttggttgagttacaaactttgattaccccaaccttgttcgggaatgcgaaacggacctcttcagggttagatcataatcgggtgtcattgattatggcggttttagaaaagcgggcgagtttgatgctttcaaaccaagatgcttatcttaaagcaaccggtggcgttaagttagatgaaccagcgattgatttggcgatggccgtttcaattgcttccagttatcgcgataaagaaattccaccaaccgattgttttgtcggcgaaattggcttgacgggtgaaatccggcgggtcaaccggatcgaacaacgcgttggcgaagcggcgaagttaggttttaaacggatttatgttcctaaaaataatttgcaaggttgggatccaccaactgatattcaagtcgttggggtcaccactattgcagaaactttaaaaaaagtattcaactaggcataagttggtgcgagaggaggttttatgatgcaacaaaaaccattaactaaaagaagagtgttaggaattgtctttgtaattctagggggtgctttagggattacggcctttccggaattctggcgagttgttcatttagaattagtcacatatctcaataatggcattaccaatgccgtgttaggtgcaattattttttatcttttattcctggtgttggctaatccgatgttacgggcgatgcgtcaattggaaaaggcgttgtttaaacaatcacctagtttcctattatttgggagtgttttctcattaattggcttgttattagcaaatgttgtttcgattccgttataccggatgccgatttttgttctgaacactgttgtgccaatcctattgatgattgcgctcggttacttaggcttcaaggtggggacgacccgcttagatgaatggcgtaagttcttacaacctaagaagcgtaataccgatgtcttggaacgcaaagtagacgataatttccgcaagtacaagattttggatacgagtgtcatcattgatggtcggattaaggaaattgctaagaccggctttatcgaaggcacgttgatggtgccgaacttcgtattacatgaattacaattaatttccgattctgcagacaacttaaaacgggcgcgtggtcgtcgtggtttagatatcttgaatgaattacaaaaggacgaaagtttatctgtcgaaatgtacgatggtgatttcgaagatttaacggaagtcgatggcaaattagtcaagttagcgaagttgctagacggaattgtggtcacaaatgattacaatttaaataaagtctgtgaattccaaaacgttcctgtttttaatatcaatcaattggccaatacgttgaaaccagctgtcttacctggcgaagcgatgaccgtcacggtggtcaaagccggaaccgaacgtcaacaaggggtcgcttaccttgaagacgggacgatgattgttgttgaagatggccaacattaccttaataaaccattagatgtgattgtgacaagtgccttacaaactgctgctgggcggatgattttcgccaaaccagcgcatcaacaaaaaggcttgaatgaaaaataagcattcagatgactttacacggtcaccaataatcggtattattgagactaactaaattgtataaattgatgaagagaagaagtagattagccggattttcagaaagcttctgggcgctgtgaagaagtaattgggctagtcgaaatgcaccttggagatgctagtggactttggctgctagccgggacaccgttatctgcttgaggcatttttgcgaagaaaagtggaaccacgctcaaccggcgtcttttgttaattaacaaagggcgctttttatttggaagagtgctctttttaggcgattatctcctgaggattaacccagaatggcgaatgattgctgtaagcaatcgtttgacattcagggttaaccgaagggggatgcctgaaaaaagcacgtttaaaaggagagtgcaacagcgggcgcttatattttgagcattaataaaaaattacgaataatcccggttttaggattatttgtaattttagattaagcggaagttgttgcaaccaaaaagcgcgtttaaaagaagagtgcgtcattaacgggtagcttttgagcattagcacagtgttgcgaatgaccgacagagttggtcgtttgcaatacgtagctaagcggaaaaagctgttaatgaaagcacgtttaagaaaggaagattcgatgcttactgtttataataccctcacacgtcaaaaagaaacgtttaaaccccttgaagaaggccgcgttaagatgtatgtctgtgggccaactgtgtataactatattcatatcggtaatgcgcgtagtgcgattgcgtttgatacgattcgtcgctatctcgaataccgcggttatcaagttgattacgtttcaaactttacggatgttgacgataagatgattaaagcggctaacgcggaaaacatcaccgtgtctgaattagcggaccgctacattgccgcctttaaagaagacactaaagccctcaatattgaaccagcaacgcttaatccacgagcaactgataatattgaagaaatcgtagcgttcattcaagatttgattgctaaagattatgcttatgccgttgacggcgatgtttattaccgtgcccgcaagtttaaggcttacggtcatcttgctggtcaagatcttgatcaactcgaacaaggtgccagcgaacatacggctactgaagaaaccttacgtaaggaagatccaatcgattttgccttatggaaagctgaaaaaggcaacgaaattgcttgggaatcaccttggggcaagggccgacctggctggcacatcgagtgttccgtgatgtcgactaaatacttaggcgacacgatcgatattcatggtggcggccaagatttggaattcccgcatcacgaaaatgaaattgcccaaagtgaagccaagactggcaaaacctttgtgaactactggttacacaatggttttgtaacagttggggatgacgatcaaaagatgagtaagtcacttggcaatttcgtgacggttcacgatttgattcaagaagttaatccacaagcattgcgtttcttgatgagtagtacgcaataccggcggccaattcgctacagccaatcattgttggcagaagcccaaactaatttggatcgcttgaagacaacacttgataacctggctttccgtcaagcaacggctgaaccgggcgaagatcaaattgtgatggataaggcagctgaattggaaaccgcttttgtcacagcgatggacgatgattttaacgttcaaaacggcttaacccaattgtacgaacttgctaaattaagtaaccaatatttggaacaaacaacggttcaagccgatacattaacgtcattggcaactcgcttaacgcggctattagccatttttggtgttgtgtttaaagtggaccaattattggatacagaagttgaaagtttaattgaagaacgccaagccgctcgagcagctaaagatttcgccaagagtgatgcgattcgggaccaattaaaggatcaagggattattttggaagatacaccacaaggaatgagatggagacgcgcatgaaaaatgctttacaactaaacgggattgccttagcttacatgggggattcagcctatgaagtttacgtgcgggcccatttattagaactcggcttaaccaaaccgactcgcttgcaacaagtcgcaacacactatgtgtctgctaaagcgcaagctgctttgattggtttgatgatcgatgataactatttaacagaagaagaaatgaatatttttaaacgcggtagaaatgccaaaagttatacgaaagccaagaatacgagtgtttcgacttatcggacctcaactggctttgaagcggtttttggctatctatacttaactgaacaacaagagcgcgtcgctgaattagcccactggtgtattcaacaagtcgacgctgggaggacccatgagaaaaaataataaccaatcttataatcagaagaataatgaatttaacagtcgtcggacggctaaaaatgctgctaagccaacacggcgcccagctaacaagaaaccaacagcacctgtcgaagaagcagcggttgaagaacaaactgatttcgtcatcgggaaacatgcttctttagaaacattgaagacgagtgatgctaagaagattaacaaaatcttccttcaagatggtttgaaagccgacttcgtacacgatgtcgttaaattggcgaaagaaaaacggttgatcatccaaaatgtccctaagaacaagttggacttattgagtgatcgtcaaaatcaccaagggattatcttagcaatcgcaccgtttgaatatgcgagtgttgatgatattttcgctaaggccaaagcgcaagaagaagaaccttttatcttaatcttggataacttggaagatccgcataacttaggatcaattatgcggacagctgatgcagttggtgtacacggaattatcattccaaaacaccgtgctgttggattaacatccacagttgctaaaacgtcaacgggtgcgatcgaacatattccagtcgcgcgcgtcacgaacttaacgcaagaaatcaaaaaactcaaagaccgcggtctctggatttttggcaccgacatggccggcaccgactatcgtaagtgggatgctaagggcccaatcggtttaatcattggtaacgaaggcaagggcctttcaccaatcgttaaaaaagaagttgatcaaactttgacaatcccaatggtgggtcacgtgcaaagtttaaatgccagtgttgctgcgggggttctcatgtatcaggcttataatagccgtcaacctttggtatagcttatgaaaaagcagattttaattgcagatggctataatattattggtaactggcctgaattaaataagttaaagcaaaatgatcacttggcagatgcgcgcgatagtttactgcaaacattatcggagtaccggaagtttcgcgaaatcgaaattatcctcgtctttgatgcgatgtatgtgccagggattaaacaaagctatgaacaatataatcttgaagtcgtttttactgaagaggatgaaacagctgatagttatattgaagccttagctggtaaattgatgtcaccgattaatcaggtcactgtcgtttcaagcgatcaggctgaacaatggacaatcttttcgcggggggctttgcgagtatcttcgcatgatttctatcgcgagattaagcggacgcaccgcgagattgaccatgacgctaaacgttatcacagtaaggtgatgcaacgtaatcggccgtggaatgacgatcaattagaacgtttagcgcagatgcgcgaccaattgagtgacgaaaagactgattaaacaggcgttcgcttacagattgggcaaactcttgctaaaataacagtatggttgttgcgtgaagggagtttcggtcaatggaacaaacaaagcgcgacaaaatgctgattgcagcagtggctcagaatgattcacaagcactagatgtattattcaaggcgtatttgccgatggtgtatcacaccgtggcgccatattatatccggttattcgatgaagacgattggttacaagaagcccggattgtttgttacgaaacttgccaatgttacgattgtcaaaaaggcaaaagttttgggagtttctataaattacggtttaaaaaccacattttaaatttactacgacgagaactcgcacaaaaacggcgaggtgatcgtcaggcagtattgattgcggagcggccggaacacgacgcgatttcagaagatacgatgacttactatcaatcgcagtttgaattgcgatgttatcttgaaacgctgtcgccttttgaattagtgtcgtttcgggtgctgaccgggcagctttcaatggatgaagcttgttgccaactcgattgtacgattgatcagttgaaacggggccaatcaaggtgtcagactaagttaaaacggtattatcaagagaatcgttaaccaaaagcggtgggactggactaaacgggttcaccgcttttgttgatggattctaagattgacaggttcgcctgcacatgataaagtgaatgggataaacatcacttagagaggggcttttagtcatgggtgttaagaaagtcgccttagcctgtactgtctgtggttcacgtaactattacgttgctgaaaacaagaaccggacagaacgtctagagttaaacaaatattgtaaacattgcggacaatacgcacaacataaagaaacacgttaacataggaggatgaagatgattaagtttttaaaaagcgttgttgaagaaatgaaaattgttacttggcctaatgccaaacaaacgcgtaaggatacatcaactgttgtgatgacatcagttttatacgcaattttctttggcgtcgttgacttagcaattctcaaacttcttgaactatttattttttaaaactagcttaatgaagctggttttgctatacttgtggcaagcagaaaacttcgcgtggtcggagtttttttattttggtatttaaaggagaacaaacatggttgaatcactcgaaaaaagctggtacgtattacacacttattcaggctacgaaaacaaagttaaggcgaacttagaatctcgtgcccaatcaatgggaatggaaaacaacgtcttccgcgttgttgtacctgaagaagaagaacatgaaatcaaaaacggtaaggataaagttgatatgaagaaaactttccctggctatgttttggttgaaatggtgatgtcagacgaagcttggttcgttgttcggaatacacctggtgtaactggctttgttggttctcacggtgccggtagtaaaccagccccattgttggacgatgaaattagccaaattttacgtcaattaggcatgagcacacgtcatttggatgttgaattcaaagtgggcgaatctgttaaaatcgttgatggtgctttctctggtttagttggtcaaattacagaagttgacgacgaaaagatgaagttaaaagttaatatcgatatgttcggccgtgaaacggcaacagaattagactacgatcaagtagacgaattagtttagagtgcgccataagccgggtatatcttgaggactaacagagaatggcgaatgattgctgcaagcaatcgtttggcattcggcgttagccgcaaggatatggcttatagaacacgtttaattaagagtgcgttaccagtggttagattttgagcatttgccaacttggcgaattggcgatgcaatcgccggtttgataagtgtagcaaagcacagaaagctactggtaaaagcacgtttaagtaataatcgagggaccgtgacaaaagtaatttttgttgcggtcccttatttgatagtcgaatattaatagtggaaacgtgctttttgaaactgacttctgtgcttagcgtcactcgtcaaacaactgcttacagcagttattcgccgagttgtgctaatgctcaaagtcaaagcgtttcaaacgcacttcttattttagacagaatgatgtgatgaatatgtggcagattattaatcagttattagcagtcattgttattttagttgtagcagcagcgtgcttaattgggctcgattattataaattagctcacgtacagcatcactggtgtccacgactaacgcattatgaaacagcaccgacgttgtttatccacggttatcggggtaatcggtattctatggggcatttattgatgcgtctgcaaaaaacggggatcgccaaaaaagcgttagttatcaaagttgctgccaacgggaccttaacgtttaaaggcccacaagaattgacagccagtaatccgacgatccaagtcctatttcaaaataatcacgctgatgtgcaggatcaagttcgctggctcagccaaattgtggctatcttgaaaaaagattacgacgtaaccacgattaatctggtgggacactcgatgggggccatcacagtattacgttacttattaaagccgactgccgtgccagttaaagcagtcgtattactagcagcaccggttaatgatccgtcgattgggccggatactgcaacggtcttttggagcgaattaacgcaacggggaccgcgtaaaaaaacggctaattataattatttagccaaacgagtggcgcatttcccaacgtcaattagtattttgaatgtcgctggcgaattgttgggcactagccgtcacgacggctcagtggccgttgatagcagttttgcgctgcgtagtttattacgggggcgaatcgaccggtatcaagaaatgcttgttagaggcgccggtggggctcacagcatgttgcacgaaaatcggttagtcgatcaggcaattagtgattttttgtggcaagactaattttaaaagagcttgcatttttcagaattgattggtatattatgagagtatgttttcatacactagtgggagaccaaatataatggccatcttaaccacatcacggacttaaggaggtatgtttcgtggctaaaaaagtagcaaacatcgtaaaacttcaaattcctgcaggtaaagcaactccagcaccaccagtaggtccagctttaggtcaagctggtatcaacatcatgggctttacaaaggatttcaatgcacgtacagctgaccaagctggtttattgattcctgttgtcattactgtatacgaggatcgttcattcgatttcgttacaaagacaccaccagcagcagttcttttaaagaaagctgccggtgttcaaaaaggttctggcgaaccaaacactaagaaggttgcaactgtaactaaagctcaagtgcaagaaatcgctgaaactaaaatgcaagacctaaacgctgcagacgttgaagctgctatgcgcatggttgaaggtactgcaagaagcatgggattcactgtcgaaggttaattcatgcttgacactttcagtcggattttcaatgaaagttgaaaaatcaagtgggaggtcaaaaaccgttcaccacaattgcaaggaggaaaaccctaatggctaaaaaaggtaaaaattatttagaagctgcaaagcaagtggatgctactaaagcatacactgttgaagaagcaatcgacttagtaaagaaagttgattttgcaaaattcgatgcatctcttgaagttgcatatcgtttaaacgttgatcctaaacaagctgatcaacaaattcgtggtgctgtcgtactaccaaatggtacaggtaagacacaacgcgttattgttttcgctcaaggcgaacaagcaaaacaagctgaagctgctggtgctgacgtagtcggtgcagaagatttagttgaaaagatccaaggcggctggttagactttgacgttgccgttgctacaccaccaatgatggctcaagtaggtcgtttaggccgtgtcttgggacctaaaggcttaatgcctaaccctaagactggtacagttacaatggacgttactaaagcagttaacgacattaaagctggtcaagtggcataccgtgttgataaagctggtatcgttcacgcaccaatcggtaaggtatcattcgatgctgctaaattagtagaaaactttaaagctatgcaagacgtaatcatcaaagctcgtcctgcttcagctaaaggtcaatacattacaagtttatcagttagctcaacatttggccctggtgtcaaagttgacgttgctagcttctaagttggtaatgcaaaaagcgctcatcctttcggatgaacgctttttttatgccgttgattaggcgttgatatcaataatttcaaatttagtcacatcaactaagcctttatcggtaatccgtaagtttggaattacatcgagtggcatagcgccgagtttcataatcggatcaaattgggcagtgacgttgagttgttcatgacaaatggtattaaatgctttttgatgggcgatgagtgaatcaattggttcagtactcatcaaaccaccaattacaaatggaagggttgcgattacctgaccattttgaacggcaacaccgccaccttggcaagttttgagtgcatcaatggcaacgaccatatcagcatcgttagtgccgacaacgactaagttatggctgtcatggccgatgctggtagcaatcgcgccattttgaaggccaaagccgcttaaaaggccaaccccgacattgccggttaaatgatgtcgttcaatcacggcaactttaacgatatcttcgctaggattatagtgaaaatcaccatctgcatcgtgtgtaacaggtaagacaaggttttgagtgcgactaatactttgtaagccaatcacatgggctttgtcgctagtcagtttgagcttcaattgatcagctgaaaaattgtcgagatgaacggtttttagaaggtcgccaaaaccggcgacggaatcatcggttgttaataagtaagcgccgtttgcagcaatcttttgaccatcaataaaggtttggttaacgctgaagtgttcgaggtcgtcgaccaataagaaatcagctttgagaccaggcgcaataccaccacgatcgctgaggccggtacattgagctgtgttgatggtggccatctgaatggcggttagcggatcaattccgttttgaacggcgacacgaatgctttcgtccaagtggccagtttcgcgaagggtaacagattgtaaatcgtcaccacagaggcaacaaaagcgtgcgttttgaggcgtaacgccttttaaaagtgttggcatattcttagaaactgtcccgtaacggaggtaaacgtacataccacgactgatacgatcgagcatttcatcaacttgtgtgcattcgtgatcgttgtgaacgcctgcggctgcataagcattgagaccttgaccgtgtaatgcgggtgaatggccatcaatcattttatgtgcgttaagtgaaactaataattcatctaaaacgccatcgtcggcattgacgacgccgggataattcatgaattcggcaaggccgtaagttagtccttggtcgtaagattgtttaatctcatctgcagtaatgacagcaccagatgtttcgagggttggatttgcagcaggcacacaggacggcatcgtatacttgatgtcgagtgctgtatttttggcagcagcaaccatgtattcaagaccgcgcataccggagacgttgacgatttcgtggggatcggcgagaatggtggtcgtcccatgcggtgtcacgagtgatccaaaaacggcgggtgatacgttagctgattcgatgtgaatatgaggatcaatcaaaccgggtacgacgtattgaccgtgtgcgtcaataacattgtcggctgtataagctgcgtcaattcccagaaaacggccatcggcgatagcgagagtgccttcgatgatccgggcgttatagacatcgacaattttagcatttttgatgattgtgtcggctggtttgcgaccggcagcttgatcgatgagttgttttaaagttgatttatccatattaaaaactcctttttatttaccgggtaattcgtgcattgtaaagagtaagactaagaataagagggcagcaacgtacataatcggatgcacttttttacccttaccagccgcaatcattgtgatggggtatgagattaaaccaaaagccaagccgtatgagatattgtaggttaatgggacacaaaggatgatcataaaagcagggaatgctgtttcaaattcagaccaatcgatgttggcgattgatttaatcatgaatgagccaacgataattaaaatgggagcagttacttcagatgttacaactgctaataaaggtgagaagaataaactaagagcgaacatgatggcgacaacgactgcggtaaaaccagtacggccaccaacggcgatcccggttgaagattcaatataacaagcagttggcgttgagccaaagacggaaccggcaatcattgaggttgaatctgcgaagagggctttaccgacttctttaggcattttgttatctttgatgaagccggcttgttgggctaaaccgatcacggtcccagttgtgtcgaagaacacgctgaagaaaaagacgagaacaacgaccgccatttgaactgagaaaacatccttaagatgaatgagagacacaccgaaagttggtgcgaggctaggaattgaagaaacgacaccggttggcattgcgattaaaccggtaacgacacccatgatggcagtagcggctaacccaatgaagagggcgccaggaattttacgagcgagtaaagcgactgttaagattagaccaaagacggttaaccaaacatgcggattagaccagttagtgatggtaacgaaagatttggcgctggcaaccaccagaccgccttgctttaaaccggtaaaagcaatgaataaaccaataccaacagccatcgcagatttgagattggcgggaatggcattaatcactacctcacgaacttttaaaacagtgacaagcatgaagagtaaggaagcgacaaaaacaccggctaaagctgtctgccaaggaatacccatgcctaaaacaacagaataggcgaaaaaggcattactaccaagtccaggagcgacagcaatcgggtagttggcgatgagggccattgccaaacaaccaacgataccggtgagtgctgtggcgacgaagacggcgcctttatctaaaccagcgtcccctaaaattgtggggttcacgaataaaatgtatgacatcgcgatgaaagttgtaatcccggcgatgatttcagtcttaagggttgaaccactttccttaattttgaattggcgttctaaccaattcgttcgtgtttctgatatagaatcaacctcttgtccataatgcacctcttaatttatttgaaataagaactattgccttattgtacaccaaaaggttttgctttttaagactaaatgtgaaaaattgtaaaaataatacgattaaagttcgtttattgatgtgaaatcaaattatttaggcacaaaaataagtatttaaggtgtaaaaccttaaatacttatcgattaaatttaaacgagtgctttaacttgtttggcaatcgctaattcttcattagttggaatcatcaagaccttgattgctgaatcatcggtactaatttgacgggcaccgtgaccttgttcattacgttctggatcaatcttaacgcctaaaacggctaggcgttcgcagacatcagcgcgcattttagcatcattttcaccaattccggctgtgaaagtaatgacgttggcaccgccaagttcaacgtagtagctgccgataaacttagcagcagaagtgatgaacatatcataagctaatttggcgcgggggttagttgctaatgatgattggatatcacgcatatcagcagaaacgcctgaaacaccgagaatccctgattctgtatttaaaagggtgatgatttcgtcagcgctcttgtctaattcattcattaaaaacggtacgatggcagcatctaatgaaccggcacgcgtccccattggaaggccttcaagtggtgtgaagcccattgatgtatcgactggtttgccattttggctggccgtgatggaagaaccaccaccaagatgtagggtgatcaattttaattctgcgactagttggtttaaaaaggcggctgtttcttgtaagatgtagccgtgactaataccatgttcgccgtatttacggatttggtatttttggctatcttcataaggaagaccatagaaacttgttgcgtccggcatatctaagtaaaattgactatcgaagacagcgacttcgggcaccgaatttggtaggatatgcattaaggtttcaatgcaatccacttgaacaggattgtgtaatggtgcatatttatcgagtgccttgagggttgccaaattatcggcagtgattaacgttgatttttcaaatgttgttgcaccggccaccactcgatgaccaacggcgacaatgtcgctaggcgagtcgataatggcattgtcttgtaattgtttcaataaacgaataacgccatcttcataggttagattagcgattgcgacctgttctttttggccgttaaatttaaaagtaaagcgcgcttcgggggtattcatccgttccatcaaaccgctagccactaagcttaaatcggtttgttgaaatagttgccactttagggatgaactaccagcattgataactaaaatattgttcaaaaagaaacacctctactatcttaattttcttgaataactatattttatacgctattttcagaaaaataaaataagcataaggtaatgctgctataataaatatttatagttaaattagcattgacggcatgctttttacatgctatatttgtagttggttatttatgctaccgaagactcaggtgccaataggcttaatatcctgccgaggaagatacgttgaaatccctctctatgtcttggtggacatggagttttttattttataagagactcttgaccacaagttttacaaatctaatggaggtgaatcaattgagcgaaacaatcattgcaaaaaaagcacaaattgttgacacagttgttgaaaaatttaataacgctgtttctatcgtagttatggattaccgtggcttaacagtagaacaagttactgaattacgtaaacaattacgtgaagctggcgtacaaatggaagttgttaaaaacacttacttgcgtcgtgcagcagacaaagctggttacgaaggtttagatgaaacattctctggccctactgcagttgcattttctaacgaagatgttgttgcaccagctaagatcatcgctaactttgctaagagtgctgatgcacttgaaatcaaaggtggtatgatcgaaggtaaagtggcaacacttgatgaaatcaacgccttggctacattaccaagtcgcgacggtttattatcaatgttactttctgtattacaagcaccagtccgcaatgtcgcatatgctgttaaagcagttgccgacagtaaagacgaaccagctgcataatttaaaattgtgtagttaaaagtgttatcaaaaaaatattacccataaaatggaggaaacaaaaatggcattagacgtaaatgcaattgttgatcaattaaaagaatcatcaatcttagaattaaacgacttagttaaagcaatcgaagaagaattcggtgtttctgcagcagctccagtagcagcagcaggtgcagctggcgcagacgcagcagctgaaaaagacagctttactgttgaattatcagaaatcggccaagaaaaggttaaagttatcaaagccgttcgtgaaatcacaggcttaggcttgaaagatgctaagggcttagttgataacgctccttcagctcttaaagaagacgtttctaaagacgaagcagaagaaatgaaagctaaattagaagaagttggcgctgtcgttaacttgaaataatttcctttatttctaaaagaactccacatttgtggggttctttttttatagcttatttcatcggccattcgtttaccataagccccgttgatggcaatcacaccgtgttaagcaccgcttcgacgccgtagctgccactgccttgtaataagacggcggtgtaggtgtctaacttggcttgggcgagtgcaaccaattgttgacggatatcttcggtgatggcgaggtagtcttgatcccaggtgctaaggtcgacttgcatagcttctttgacagcggctgatgtgctgagggggccaggggttaaaagtaaatacggttggttcatgattaggcgtgctccttttgtggtgtttggtattttgcaagaatggccggtagttcgctgagattatgaatgacatagtcagcgccagcttccttaagggttttagtaatttctgcaaatttagcaagccgtattttttgagggagatcaatgagttccgctttgtttaatccgaggaggctactactttcgataaggccaacggttaagacgccggcatttttgccttcttgcatatcaataacggtgtcaccgactttaacgactgtttgcgggtcggtgatattgaacgcagtcatgatgtggttaatcatatcgggtgctggccgaccagcagcgacgtcttcttttgaaaccatcagttcgggatgataaccaagtagtcctgcttgcttagcggcgattgcgagcattgctttggtgtagccggtcgttgtcgcgatgtggatatgatgtgcttttaaataagtttggacttgaagaactgcaggggtcagtgttgtttctgtactcaagcgattgagcaagaattgttcaaaatagttaaagagttgcaattgatcggcatcggttatcccgcgtttgtattttgcaaaccaagcacgttgtacctctggcattttagcgagtttggcaatgtgttcatgtttttcgatgcccatatcctgtctaattctgtcggtatcgatttggatgccggcagcgttaaacgcactttgaaatgctaatactggatctaaactgccaaaatcgattatagtccctgcccaatcaaaaatgacgcattgaatatccgtcatgtgaaaaagcctccttatgtcgttgcaatattgaagtacaaattcagtatagggaaactttgtaaatctccagcgcgttttcagtaaacgttctgtaatggaattgaaaacattaggttctctcaatttggtaattgtcaatgacactgattaatatgagggagggtggccaaaaaaaaaacgcccaagacaaattgtcttggacgtatggcggttaagttagtgcttgaacgcactcagattgtaacgtgcttttcaatgtacatgcttgcgtttagcaccgctagtcaaacaaccgattgcatcggtcgttcgcctatctatgctaatgctcagaacataaccgcattgaacgcactcagatttaaaacgtgcttttcaatgtacatgcttgcgtttagcaccgtctatcaaataagtgacagggtcacttatccgctagactaagctaatcctcagcatgtagctacattgaacacacttcgttttaataattaattttataggttagttctacgaattggcctagttggcgggttttacttaattctaatggcatgtccgttaagtgggtgctgatgagggaaataccgtcgcctagtaaaacgggagcgatagtgatgattagttcatccactagttgtgcttttaagagcattgtgaacgtttcagcgccaccgactaaccaaatattgccaccatcttgtgcttttaattggcggacgaattctggcacattaccggtgaccacattggtgcggtcggcggtatcgtggagtgttttagaaaaaacataactttgtttttcctgataaggataggtcccagccagtttgatacattgttcataagttttacggcccataataatggtatcgacaccttggtaaaagctttgaatagcggcatcggattctgatgaattaagtgcggatagccaagcggtactgccatctttttcagcaataaagccgtctaaactttgcgcgagatataaaatcactttgcggtgttctggttctgtcatggtcaacacatccttttagtttggttacctacagtataccaaattaaagcgctttaatctggtttgaaccgttggtaatttagcgtgatttagcttatcatgataagaatagatgttgttaagggagcgtaatcatgacagaaaatgacttttcaccagagattcaaagtttagttgcacaagtacaggctaattatccacaaccgattaagattcgggttgcacaagaagcttctgggatgttaaaacacgaccaggcacaacgcgtgatgaatgacgatggcagtttggcaatcttattaacagatgcgacagctgtggattattcactatcacacgaattactccatttgttattgttatcgaccggttttccacaagtgttggaagatgtgacgactgaaaatgtccagttagatgaacaattaatggccactgggatgacattgtacaatgcggcagtgcatacgattattcaacaagaacaagtggcccatggttttgtcgataccgaaaccaaacaagcctatctagaaggtttccgcgataatatgacacctgaaaaagatgatccagaaaatcaatgggtgatttaccgcgtcttaacgctattggatgcacttgtctttttcgatggcggtaatcaacagttggataaccagtggacaactgattatccagtggcttatccacaagcccaaattttataccaagttttacaacggaaaacaatcgattcaccgttcacattacgccgagctgtgattaacttgtgggttgcatttgaccgcgtgttagagacgcttggttttgcggccactaacttacaacaattattgacgctaacaccggttttgagcgaacgccaattgcgtttagatgtgcgccaagtttatgatattcttcattcagaccacttgttagctaataaaacgcaacaaatggcctatgttggcattggtaagagtgatcaacaaaatgcgtttgtcttgagtgtttctgataaagaagcaacacccgaatatttccaacgcttatatgatttatcagtgcgtgatttcttaaatgaaattgaaatgccttattcactacgttaattgaggagaatgaagatgttagaagaacaatatcaaaaaattgatgcgcttgatcaacaacttgctgccctatttgaacaacggatggcagtggttgatgaaatcgctcaaatcaaatttgacaatcaaatcggtttgaccaacattcaacgcgaaaaagcggtaatggaccaacgattggctgcggttgaagaaccgaagtttgaaccgtacattgttgatttatatcaaacgatgattttaatcgccaagcaatatcaagttaaaaaaatgaaggctcttaaagaacaagcagaagcctaatgccaaaatgacgtttaggggaacctgacgtcattttttagtgggtaagtatgctagaatataggtaattataaaaagacgaggatgttaaccagtgactaaacgacgctataatttagccgtgattcgttaccgcggtacattactattattaaaccgacttaaaaagccctatgctggcctttggaatgggattggcggcaagaatgagggtgacgaaactgccgaaatgggtatgcgacgcgagatttttgaagaaacgggtctcaatcagaatcaatataccttgtataatacggggtggttggactggcatattgacggtgagtttatcgccgggattgatgtctttttggcggagattaaggaatcggtgcagttaccgctctatccggttggcacgcgcgaaggcattttacaattattcgatgagcaatgggttttatctgaagagaactacggtattgttgccgatttgaaagttattttaccagaagtgctcgccaaaaatgttaaacgctactacaccgattttcacggggaacaattaattgcctatgaagcatttccgattgaggaggggaattaaatgatgacgaaagaacaaactttgatggtgctccaagtattgaaacgtaaattacaaggcctcagaatctttagggtcattgaagagttattttcactctatattattattaaagtctttacggccgatagccaagtgaacttattgggcgtcaactttacagaaggccgggcgattgaattgatggtccttttattagtgattgaattttgcttaacgcggattcaaactaactacaaacaggtcggtcaacagttaatcgagaccttaaaagatttgacggaacaagaaaaacaacttgtgcaacaatttaaacgctattaggtggtggttaaatgatcacgatcggtttaacgacttggagtgagcaccagtccctaatgccggagaaaaagcagttgacgttgaacgattacgcgcaattcttaccaattgtcgaggtcgatagtttttattatgcgctacaagcaccaaccgttagcgctaagtggctgcagcaagtgccgcaccaatttcaatttatcgtcaaagcacataaggcgatgaccaaacaggaagattacacggacttcactagtacggaaaaggaattgtttgttcgttacaaacaatcgattcaaccgctcttagatgcggggcaattaacggcggtcctatttcagttcccgccgttttttcaattgaatcaggaaaatgtgcagtacttgagacgcattcgcacgtggttgcccgatgtgccgattgcggtcgagtttcgtaatggcacttggtacgatgaagcgtataagcagaacatgtttgcttttttaaaacagttaaaaatgacacatgtaattgctgacgaagcgcagacgcccaccaatagtgtcccgtttgaaccggttgtgacgaatccagattttgcgatgctccggttgcatgggcgcaatatggccggttggcagaatccgggcgcaatgtggcgcaaacaacggaccctttatcgctataacgcagatgaattgcagcagtttgccgcaacggttcagcgcttaaccaatcaggctaaggaagtcgctattatcttcaataataattccggtggggatgctgccgataacgccttagccttacaacaaatattagggattacctttgaaaatttagcacctaaaggcccggaacaaacgtcgttattttagtgctttaaaagcagaacactttttgtcgcgggcttgattttatgctatactttgagtacttatatggattattaaaaaaggtcgagaataactttttattctcgtttttttaattaaggagcgaatcaaatggcagacaagaaaccaactttttacgtaacaacccccatctattatccttctggtaaattaacaatcgggaactcatacacgaccatcgcagcggacgtcattgcacgttacaaacgcttgatgggttttgatgtcttcttcttaacagggactgacgaacatggtttgaaactcgaacaaaaagcagctgaaaaaaatctagccccacaagcttacgtggacgggatggctgaagaaattcaagcattatggaagacgcttgaaatttcaaacgataaatttatccgcacaacagacgattaccacgtgaaagccgttcaaaagatttttgatcggttagtggaacaaggtgatatctatcttggccaatatgaaggttggtactctgtttctgatgaagaatacttcacggaatcacaattaacggaagtctacaaagacgaaaacggtaaggtcatcggtggtaaggccccttcaggtcacgaagttcaacgtgttgccgaagaaacttataagttcaagatgagcaagtatgccgatcgtttattagcatactatgaagaacacgctgattttatcgaaccatcatcacgtaaaaacgaaatgatcaacaacttcatcaaacctggtttggaagacttatccgtttcacggatctcatttgattggggaattcatgtcacaggtaatcccaaacacgttgtttacgtctggttagatgctttatcaaactacatcacagcgcttggttatggttcagatgacgatcaattattcaacaaatactggccagctgatgttcacttggtgggtaaagaaattgtgcgtttccatgcgatttactggccaatcttcttgatggcccttgatttgccattaccaaaacaaatctttggtcatggttggttattgatgaaagacggtaagatgtctaaatctaaggggaacgttgtttacccggaaatgttagttgaacgttacggtttagatgcgcttcgttattacttaatgcgtgccattccatttggtaacgatggcgtcttcacaccagaagatttcgtcagccggattaattacgatttagccaatgatttagggaacctcttaaaccggacagtcgcaatgatcaacaaatacgatgatggtcacgtgccaagttatcaagctgacgtcacagcttttgatgctgacttacaagcaactgcaacgcaaacaattgcccaatattcaactttaatggatcaattgaaattctcagatgcacttgatacaatctggcaattaatcagtcgtgctaataaatatatcgatgaaacagaaccatgggttttagccaaagatgacagtcgcaaggctgaactcgatagtgtcttagcacacttagcagaaagtttacggattgtggccctcttattacaaccagtcatgacacatgccccacgggaaatgtttgcgcaattaggccttgattttgatcaagaagcacaacgcgaaatggtttacggccgcttcccaagtgatattaaagtgattgctaaagggacaccaatcttcccacgtcttgatttagatgaagaagtggcttacatcaaggaacaaatgatggctgctcaaaaagctggtttggtgaacgaaaaagtgaaagctaaacaagcagctgcagaagaagtcgctgattttgatcctaaggccactgaattagtcagcgaaaaagatgcaattaaattcgaagatttcgatcaatcagaaattcgggttgcggaaatcaaagctgtttctaaggtagaaggcgctgataaactcttgaagttccggttagatgccggtgatcaaggcgatcgccaaatcatctcagggattgcagaattctacccagattttgaaaaattagtcggtaagaaagtcttagccgttactaacttgaaaccacgtaaattacgcggtgaattaagccaaggcatgttgctttcagcagaacacggttcagatgttgaattggtagttgtacctagcaacttagtgaacggttcacaaattggttaatttaaaatagcagaaacgtcaaaagggctaaaagacatttacacgctgtaggtcttttagccctttgttatggaaaagtgtgcgtttgaaacggtttgactttgagcattagcacagctcggcgaataactgcagtaagcagttgtttgatgagtgacgctaagcacagaagtcagtttcaaaaagcacgtttaaatcaagagtgcgtttcaggcggttatattgtggtagattagcctagtcgcgtgaataagcgacgcagtcgattgtttgcgagacgtagctaaccgcaacaatatgcctgaaaaagcacgttttggctgtaaaaattagcatcctaaaaggagattaaaatgcagatatttgattcacatacgcatttaaacgatacgccatatgccggtcaagaagccgactttatccaacaggctgctgaactaggggttacggagatggcaattgtaggttctgatacggtcttaaatgacggtgcgctacgtttagcacaacaatacaaagcgttatcggctattattggttggcatccagaatcagcaaaagattatacaaaggttcaagaagcacaattaattgaacaattacagttaccagaagtagttgcgctaggtgaaattggcttggactatcactgggacacgtcaccaagagacgtgcaacgaactgtttttgaacgccaaattgaaatcgccaagtccctccatatgccaatttcagtgcatacgcgggatgctttggaagatacctacaagattttaaaagaaacagatgtccgtgattgcggtggcattatccacagttttaacggtgattctgaatggttgaaacgatttatggatcttgggatgcaaatttcgtttagtggtgtggtcagtttcaagaatgcgcgtgaggtgcatgaatcagccaaattatgcccattagatgtgatgttagtcgaaacagatgccccttacttaacacccacgccttatcgtggtaagcaaaatcaaccaggctatacgcgctatgtggttgaggcaattgccaagttaagagaggtcgcaccagaagaaattgcggcagcgacttatgcaaatgcgcaccgtatttttaagttaggagcaatatgaaaaaaacgattcaagaagtcatcgttgttgaaggccgcgatgataccaaacgattaagagaagtattcccggatgtcgatacaattgaaacccgcggttccgcaattaatgatgaaattgttggaaaaattgcgttagcccaagaaaaacgcggcgtgattgtcttcaccgatcccgattttcatggtgaaaaaatccgtaagattatttcacaaaatgtaccgggtgttgaacatgcctttttaccacggtcagaagctaaacctgagaaaatgggcggtagcttaggcattgaacatgctaaacccgcggcgattaaacaagcacttgaaaatctattgacgcaagatgaagatgcagtcgaacaaattagtcagtctgatttattggtggccggcttgattgctggtccgtctgccaaggcccgtcgtgaacgtttaggggaagtcttgcatattggttacacaaatagtaaacaactgtataagcgccttaaaatgttccaggtgagccaagacgaatttggcgcagcactaagacaaattaacgaagaattaggagactaacatggaagacattgcaaacccagagcgtacgagaaaaatccttaaacggtacggttttaaatttaaaaagagtttagggcaaaacttcttaaccaacattacgattttaaaacaaatcgttgaagcgggtgagattactaaagatgatgatgttatcgaaattggccccggaattggttctttaacggaacaaattgctagaaaagcccatcaagttttgagttttgaaattgatgatcgcttaattccagttttaaaggatacgttaaatcactatcataatgtgacggttttaaatcaagatatcttggaagctgacttgccaaccttgattgccaagcattttgatggccaacacaaccttaaaattgtggctaacttaccttattacatcacaacaccaatcatgttacatttattggaagccggtttaccaatcgatcgcatggtcttgatgatgcaaaaagaagtcgcagaacgaatcgatgctgcccctggttcaaaagcttatggttcattgagtatcgctgttcaattgcactctgaagttaaattagccttcattgttcctaagacagcctttgtgccccaaccaaacgtcgattcagcgattgttgaatttgtgggacgtcaagaacccttggtgactgttcaaaaccaacaattatttgatcaattagttcgcggtgcttttgcgcaacgtcgtaaaacactctggaataatttacaaaaccaatttggaaaacaagaagaagtcaaagctggtttagtcgctgcattggatcaagctgacattgccccaagtacccgtgcggaacagttgagtattcaacaattcgcacaattgagtgattgcttgaacgaacaaccagtttttgctaaaaaaaggggataagtaattgccaaatctagatgacaatggtataattgcaatttttcagtttatatgctatactattgctcgaagaggtgaagcatatgccaaccacacttgccaatattaagaacggtctcgatgggcatatcggagacaagttaatggttgtcgctcaagctgggcgcaagaaagtaacaaagcgaaaaggaatcttaagagaaacctttcctgccgtttttgtagttgatttggatcaagatgaaaatgcgttcgaacgtgtttcatatagctatgctgatttattaactaaatcggttgcgattgaatttgatgaagaaccaattgtactttagtttttagaataagaatacgagcagggactgagacatggatgattgtctgagttccttttttgttgttgacatttggcgtgtatcacgatattgtatatggcatatactgatttataaacagctgttacttgtcgattgtcaatagtgtcaatagtcaattatgcggatttatgttacagttaaataaagtgaacaagggtgggaataattgtggaagatagtcaattattggatgagtatgttgagatttatatgtctgccattaagtatgttgaagacctcgtgtcgcaaccaactaaggcttacaagctatctttcgaacaatttctgattatgaaggagattgcggaagatagctcggttagtttaattgatattgctaagaagcgtggtgtaacacgaggggcgatttcacgtcaaattcgggtccttttgaagttggactatatttcgcaatcaactgacccaagtgatcgcagacggttaattttaaatctgacaccaagtggtcaacaaacagtgagtgagttattaccgaaggttcaggaacgtttttcatcgtggatgatggcctttggcaaagaaaatgccaaacagatgttatttttaatgaatgagttcagacaaaaagtcatggcggaagaaaattaaaagagtgggtcaagttgagaggcttgaccttttttatgtgaaggctccagtgtggtacagcacttttgaattgaaacgtgcgtactaagcaacttctttcagttagtatcgtcagccaaacaatcgactttgtcgcttattcgtctgatttcactaagcttcagaagtatccccgcttagtacagcactcttggtttttagttcataaatgagtataatgaaacaattgaatgttggtggatggtgagacgatatgcaattgattgaaaaggcacctgcgaagattaatttaagtttagatgcactttatcagcatactgatggggaattcgaatggcagatgataatgacgtcaatcgatctggcggattatgtccaaatcacattgcaagactcacctcaaattgaggttagaacctctaagggatatttaccggaggacaaacggaacttagcatatcaggcggcgcaattattacggcatcgttttgatattaaaacgggtgcgattattgaaatcgataaacatattcccgtggcagccgggttaggtggtggcagttcggatgccgctgcagttttacgcggtttaaatcaactgtggcacttaggcctcaccaaagcggagctcgcgcatatcggtttatcaattgattcagacgtgccatattgtgtttatagtgagaccgcactagtaacgggtaaaggcgatcaaatccaaccgttgggggatttacctaacttttggatggtcgttgttaaacctgaagtaagtgtctcaacaccgcgcatcttacacgccttgaattgcgatcagattactgatcggccccaaaccgatcgactcttagcggggatccagcaacaagatgcacagcaaatgacagccgcaatggctaatgtgttaacgccgattaccaatcaacgctatccgcaaattgattatttaatgcaacgtttaactgcatttggcgcggaaaaagcgcagatgagcggtagtggtccaactgtttttggcatttgtcgccagtactcacgcgcgcaacgcatttataacagtatgtccggattttgtcgtgaagtttatctagtgcaaccattaaaaaaataaaaatcattaaagacaattcgtccccctatagctagtggtgggcgatttttttaatactattggtggtaagcggttaaaaagacaaatgataaaaaaacgaacaataatgaacttttctaaaaaaagactaggatttagcgaataaaatctatataattggaaagcggatagttttatcggaagaaattattattttaaagggagtaagtataatgaaagttagaagaagtgatcgcttaattgatatgacccggtacttgttggaaagaccacatacattaattccattgacgttcttttcaaatcgttacgaatcagctaaatcatctattagtgaagatttatcaatcgtcaaacggacctttttcaatcgcgggacggggattttagaaacagttcccggcgctgctggtggtgttcgttacatgccaatgattaaacaagttgaagcagaagaatttatcgctgaaatggccgaacgtctttctgaaaatgatcgtctgttgccagggggctatgtctatttatcagatttattaggtcgtccagaagttcttcgtcaagttggtcgattaattgccaaccaatacgttggcaaagaagtaacagcggtcatgacagtggccaccaaagggattccaattgcgcagagcgttgcgatgttcctaaatgtcccatttgtcattgtgcgccgggattctaagatcactgaaggctcaacagtcagtgtgaactatgtttctggttcctcagcacgaatcgagaagatggaactttcaaaacggagtttaccagagaactcaaaagtcctaattgtcgatgacttcatgaaaggcggcggcacagttaacgggatgaagagcttaattgaagaattcgattctgaaatggttggcatttccgtatttgctgaatctgtctttgaaggtaatcacatggttgaagattacacatcaattttgaaggttgataaagtggatattgaaaacaaggcgctcagtgttagcgctggtaactatttaacgaagaatgcagaacaactttcttaaactaaaaagagtatgaaacggctattagccgacttcatactctttttttgtatcgaggtggccagtacgtaataagaggccattgatggtatcggttagtgtgatttgtaaggcggcactaacttgttggattgattgtggttgatctgtgcgtaaccaactggcggtataggcaacaatcgcgcctgagaggtaatcaagtagaaattgttgataagttggggataacgttaaatggtgtagctgcgtcaaatcgttgataataatttgaacgagttgacgtaggtggtggttaaagtgggtttcaaatgagttctgaccattaattgtaatcgcattttgatagaacgtacggttgtcttcaaaataagtcagtagttgttctaaaataatggtccagtgagggtaagtcaggtgatcagcaacgtattcgccgatttcttgatcgtaaatccaagtcagcaaggcatatttatcaggaaaataatcataaaaggtttggcggcgaatgccagccgtggtcataatgagcgtcacgctaatttgcttaaacggggtatcaaccatgagcgccttaaacactgtggcaatctttttttgaatcgtaactgacatcaaaacgcctctttctacaaaaaaagtcgcccattagtgaatgacgactttggtattgactgggattgcttgataaaaccactttgcatcagcgaccgatagccggatacagccgtgagaattggatgtttcacccaatttttgcgcttcatcggggagaaaattccctgctttatcggttgggacactgtggaaaaggtagacaccgtgatctaaaaatgaccgccaatatttagccccttcaccaggattgccattaaagaaggcttcaccgtgttcttcttgaatatggaaagtacctttaggtgtaggagaatcgctcgtgccggttgaagcacgcatggtatagagcagcttttcatcgtccattaagtagacgcggtgcttcttgattgaaacatcaatccaaaaatgtgcgtatttcttaacatctggatagggtttcttttcagaaggggcgtgccaatcgagtggctttttagatgtttgttttttaggtgtttgtttcacgtgtgctgtttgtgaatgagtaacactcgcagttggtttagccggttggtgatgtgaggtagaccaattaataccaagcaccactaataataagattaacaggccatcgagagttaaccaaagacgtgaagggctttttttcattttaatgctccaatcggtctgaattaacatcattatacgggaatcatagagcaatttcaaatagggatagcttgcggtaatcgcttgattaagctaaaatagaccagtaatcacgaatattaggagtttaagatggtcaataaaaatgcaattattttagcagcgggtaaaggtactcgcatgaagtcaaaattatacaaggtattgcacgaagtttgcggtcgaccaatggtggaccacgtgttaaccgaagtcgaaaaaacagaacctgcaacagttgtcacaattgtgggacatggcgcagaaaaggtgaaggattatttaggcgatcgttcacaatatgccctacaagcagaacaactaggaacaggccacgctgttttacaagctgaagatttattgaaagaccaagatggtattacaattgtggtcagtggtgatacaccattattaacagctggcacttttgaaaagctatttgcttaccatcatgataagggcgctaaagcaactattttaacggccacagcaccagatccaactggctacggccggattattcgtaacgatattggcatcgttgaaaaaatcgttgaacaaaaagatacaaatgataaagaagctgctgttaatgaaattaacacaggtgtttactgtttcgacaacaagacacttttccaagcacttcatgaagtcacaaatgaaaatgcccaaggtgaatactacctcacagacgtggttgaaatcttgaagaagaagggcgaaattgtagcagcttacaagatgccaaacttcgaagaatcaatgggggttaatgaccgcgttgccttatcacaggctaccaaagtgatgcgtcaacggattaacacagcgcatatgcgaaatggtgttacattgattgatccagaaagtacttatatcgaagtcggtgttaaaattggtaacgatacaattattgaacccaatgttgtcttaaaaggcaacacaacgattggttcagattgtttcgtcggtgctggttcaacaattattgattcaacaatcgaagataatattcaaatcacaagttcaaccattgaatcagcaatcatgcataccggctcaaacattggccctaacagccacttgcgtcctaacgctgaaatcggtgtggatgtgcatgttgggaacttctgtgaagtgaaaaacgctaaaattggcgaccgcacgaagattggtcacttaagttatgttggcgatgcaacccttggcactgacattaatgttggttgtggtgttgtttttgttaactacgacggtgtggctaaacattatgcaaatgttggtagccacgtcttcatcggcagcaactcaaacatcgttgccccagttgaaattgctgatcacacattcatcgcagctggttcaacaatcacagacgatgtcccagaaaaagcaatggccatcgcccgtgcacgtcaaacaaataaagaaaactactgggctaaattaccagtcgcaaaagacgaagaatggcaatagagtgttggctgtcgcggttagtaattaaacattaatactatttttagattgagcggaaattactgcgacaagaagcacgtttcggattagagcgtgtttgtgacgattagtgttgtaaagcatgtcttgaaataaaaatcgttcgtaatcttatttctgagattacggacgatttttttatgtttgtcgttattttaaaattgagaaataatcgcgcattaagcaggtgattagaaaagcgggccataaccaaattgagccacttaaaagaagattagcaggagtatgattagacatcccacagcggtgattgcgcaacctatttttgtaacgcgataatttttagggttataatttggatggctggggtagaaaaaacggtactgataaatcaagactgcaacgaataaaatgagacccaaaatgaaatagggcatgctgagatggaataagcgatcggtagtaatcataattaccagaatgaagaaatagagattattaaaaatagtatatttaagtcgcgtcatagtaatctcctttttcaattagtgtaccttgtcacgcattaaatgacaattggattcacaaccaaaaataaccaagcattttttcgaatttaacggtatactaaacgggaggttcgatggttatagctattaacatttaattctctcttgcatttctaatgaacagcgcttacttagcgtaaattaaaatcttttttaggttttaatcttgattttcattgcgaaaatgcctagaatttaaataagtacttacttaaatttttggaggctgacatgtctgaacaatatttcgaccctaagttgaaaatctttgctttgaactctaataagcccttagctgagaaaatcgcagctgaagttggggttcctttaggaaaatcttctgttaaacgttttagtgatggtgaaattcagatcaatattgaagaaagtattcgtggtgacgaaattttcttaatccaatcaacatctgcaccagttaatgataacttgatggaaatcttgattatgattgatgcattacgtcgtgcatctgctaaaacaatcaacgttgtgttaccttactatggttacgcacgtcaagatcgcaaggcccgctcacgtgaaccaattactgctaaattagtagcaaacatgttaacgatggctggcgctgaccgtattttagcattagacttacatgccgtacagatccaaggcttcttcgatattccagttgatcacttaatgggtgcaccattattagctgattacttcttaagcaacgacttagcagaaaacgccgttgttgtttcacctgatcatggtggtgtgacacgtgctcgtaaattggctgacttcttgaagacaccaatcgcaattatcgacaaacgtcgtccaagacctaatgtttcagaagtcatgaacattattggtaacgttaatggtaaacgcgcaatcattatcgatgatatgattgatacagctgggacaattacattagcagcacaagctttaaaagatgccggtgctactgaagtctttgcttgttgtacacaccctgttttatcaggtcctgctatccaacggattgaagattcagttatcaagcaaatgattgttacagattcaatcgaccttccaaaagaaaaactaattgataagatggttcaagtttcagtcggcccactaatcggggatgcgatcaaacgaatccatgaaaacaaaccagttagtccattgttcgaaaatagatttaaacgttaatcaaataaaaagcatcgacaattttaaaattgtcgatgctttttttaattagtagacattttttgtgcttgatgcattataaagattttaagtaatagtggtgcaattagagttgtaacaacggtgacaataatcatcgctgtgtaatgactgtcgtcgattaaatgggcgttaattgcggcctgtgcgacaaccaatgccatttcgccacgggaaaccatccctgcaccaacaatatgaccagcacttgaggaaagaccacaaatacgagtcccaagccatccacctaattgtttaccaataatcgcgataatgattgttaatacgataaaactaagattatcttgaagatgggccagacgaatattaagtccgatgctgacgaaaaatacggggataaaaacagagtagccaattgtttcaatcttttctgttagaacatttttatagtcagtctgtgaaatagctagtcctacaaaataggcacccaagacatcgctcatacctaaataagttgctaagctagcaaacagtaaacagagtgtaatggcgatactagtaatgttttcagaagctgttaagcgtttggctagatttaaaattagtgggacgaaccatttacctaaaacgaaggctagaataaaaaataatagtttaggtaaaattaggttaaccagattgagcgactgaccagatgctggttgcatgatactagaaaaaatccctaatagaatgacacagataatatcgtccgcaacagctgcgccaagaatgatcattccttcttcagtattgagataatccatttctttgaggacctggattgatatgctaacggaagttgcacttagaattaagccgataaaaatagcggtgctgactgtaaaatgaaagagtgttacacagatgaaaaaggcacctaatgttggtaaaatgacacctaacgttgcgacaattagggaaggtttccaatattttaataactgactgagatcaccttcgattccggccataaacattaaaaagataacgccaagttgcgcgaaacttgtaataaaatcgttagattgaatcaagttaaagcaagctggaccaaataggacaccgactgctagttctccaataacagttggtagattaagccgggcaaataggtgagagaacaacttagtcaataaaatgatgaatgcaagtggtagtagataagccatattaggcctccaatgcactagcaaccaatgttagttctgattctaattcggaattagacattggatattcaagaataattggtatgtttggtgataaggattcacaaagttgccgccatggtgttaaaccgttatcgagtaaaaccgtttcttgtgcttgaatatttttgagatgtaaaacagttgtgtaaggtgcaagctgatgccaagcggttaatggtgcttcagtaagccaataccaattgcctgaatcaaaggtatagccagtaagtgagttatagttggtaagttctaggcaaatcattgccatatgctttaaaataccattttgattgggttcattttcgatattgagttgaacttgataggttgtaatgagttggtttaataagctaacttgttgagccgttatgtgttccaattcacctaaactaatttttaatgcagtaattccaaactgttgtgctaatttaaagtgtgattctaaattgggattaatctcagatttaataaaaagacattctgggattgaatagcgaaattcccaatgacgctgctcagcaagttgttgaagttggactagttcatcgtgtttcgtttctggcttaaataattctcctcgaacttcgaaaccagcgatttttgcggttaattgatttaagagtgcatattgtgattggccactgtgaatttccttttgaaaaacgatggtattgattaaaatttttgtcatgttttcaccccataaaaaaagctaaattgacagactactccctatgtagggaatcgtcttaaatttagcggttaaatattaagatgaaattgattaaagtataacacgtatttaattttttgcaagcgctttaattgaaaaaacgataaacagctccaaacaaggcggcatcattaaaattatgagcagtcactagttttgtccgatagaaattaggcggaagataggcagggatactttgatttaatagatcaagtagaaatttttcctgttttgagacaccaccgccaataatcaagagttctggatcaacaatcaaaatgatttgagcgagaccttgtgcaactgaacggctccaatttttaataatctctaatggcaaagattcgccacgtttagcagcatcaaatgcttcagggacactaagatgtaattgtgctgaaagttgagcttgtagtgttaaggttgaggcgcgttgttcatagttggtttgcgtggcagaatcatacaagagatagccaattgagttggcttgagccgtaccgccatcttgtaagtggttgtttaataaatgagcgccaccaatccctgtacctagtgcgacacaataaatattattagcatcttgagcagcacctactagtttttcgcctaataaagcagcgttaacatcattttcaacatagactgggagcgtaaattcatgactgagaatggcttttatttcagtaccgatgtagtttgggatagttggtccggcatagataatagtacctaattcacgattgacaataccggcagtacttacaccgatgccaatgattttataagtggtcatcactttccgagtagtctggataagttgttgcattatcatgccattttgattttgctgggtttctaattggcctaaatgggtgagagataaattttcatcaattaagccatatttgatggtggtgccaccaatatcaaaggtcagataggaagcttgagttaacataaaaaacaatcctttcgtgtaagcgttatcaaaaaaagtcttgacaactttgtaagttggtgtttatagttgaaccattcataatttttaattttcagttggagtttagcattaattaaaaattagtgcaaatccaatcatcctaaaatgtattgaccgcacaataaattttagaggtgaagaaaatgcaaaaaattggtttcggaacatttaactggattgttttatgtgtttacttactagcaatgttactcgttggtgtttattttacgaagaaagctagcaagagtacggatgccttttttaaagcagaaggaaagattccagcatgggccgctggctttagtatttatgcaacgacgttaagcgcaattacgtttatgtcaacaccagaacaagcattcttacaggattggtcctattcggttgggagtttagcgattattattttaattcctattttgatcaaattctacgtgcctttttttagaaaattatctgtaacaacggcttatgaatatctcgaacatcgttttaatccattgatgcgaattgttgggagcattctatttatgctctatcatattggtcgagttgcgattgttatttacttaccgatcctggctgtcacatcggttactgatattaatcctgttttaattgcggttattgttggtgggttatgtattatttatacattccttggtggtatcgaaggggttatctggagcgatgttattcaaggtattctgttgttaggtggcgcattattggttagcatgttgggcgcacattacattaaggggggatgggggactgttttcaatgatgccatggctgatcataaaataatttccggacttgatttcaacgcaagtgttctctcacgatttataccactaatttttgcaggtcagttttttaatacactttatcaatacacaggtagtcaagatgttattcaacggtatcaaacgacaagtacgatgaaagaaaccgttaaatccctatggacgaatggactattggcaattattacagtaccaattttctatggtatgggtactgtcttatatagtttttatagtcgtgcagaatcgttacctaagggttttaatacaacagcattggtgccttattttattattaaaacactaccagcaggtatcgctggattagtgattgccgctatttttgcagcagcgcagtcgacagttgcttccagtttaaacgcaatctcatcatgtgcgattgctgatttcaaagttcgtttctttaatgataaattcaagcaatattcggatgtgacatgggccagagttattattattatttcgggattaattagtttagcagtcgctatttatttgatgctttcagatcaatcaaaaacgctcgatttattcatgacgattactggtattttcggtgtcccattggcaggaatctttgcagttggcatttttacaaaaagagctaatgcaacaggtgccttgattggcttaattgctagtgctgttctaacttattttgcacagatggcttccatttcaccgtttgttgttagttgcgtttcatttatctcagcgtttgtaattagttatttagttagcttggtcttcaagaagagcaataaagatatcactgggttaacagttcagacaatctctgaaacttataagggataaaataatgaagcggcgtaatgtaactacgtcgttttattattttagtaaattggaaatttttttcatatctaattgttgatgaaaattaataactgccgtatcttatgtgtaagcggttaatacaatttagatggaattagttttaaagttttataggttgttatttagggaaagaatagaaggttgatgaatttgaaaaataattttttggataaggttaaagatcgattaatcatatcatgtcaggcattagcggatgaaccattacacagctcatttatcatggcacgaatggcacgagcggcttatgaagcaggcgctagtgcaatcagggctaattccgtagtagatgttcaggcaattatggatacggttgagctaccggtaattgggttggataaagtagattattctgatgcacccatttatatcacgcctacaatcaaagaaatgcgtggcattgctgccactggtgcagcagttgttgcttgcgatgttacggggcgtccacgacctcacggtgaacaattagcaacgattgtcgaaacaatgcggactgagtatcctgatacattattaatggccgatacggccagtcttgatgatgtgaaagaagccaaccgattaggtttcgacattattggtacgacaatgtatggttatacaccggctacggaaggctgcaatattgccgataatgattttgaatatttaaaacaggttttagcgatgtccaaggcgcccgtaattgcagagggaaaaatcgattcacctgaaaaagcagtcactgctctaaaattaggttgtcatagtgtcgttgtgggatcaagtatcacacggccacaattgattgctaaaacttatattgatgccgttaatgaactataaaaagaaagagggatttataatgaaggatttaacgaagtataaaggtattattccagcattttatgcatgttatgatgaagcaggagaaattagtccagaaagagtacgtgctttaacagaatattacattaaaaagggtgtcaaaggtgtttatgttaatggctcttcaggagaatgtatctatcaaagcgttgaagatcgtaaaattgtccttgaaaatgtgatggcggtagccaaaggcaaattaacagttattgcacacgttgcttgcaacaatacaaaagatagtgttgaacttgctaagcatgcagaaagtctgcaggttgatgccattgccgcaattccgccaatctattttaaattgccagaatattcaattgccaactattggaacacaatcagtgcaggtgcaccgaatactgattttattatctacaacattcctcaactagctggtgttagtttgacaacagaattatacgcagaaatgcgccggaatcctaacgtcatcggtgttaagaattcatcaatgcccgttcaggacattcaaatgttctgtgctgccggtggtaaagatcatatcgttttcaacggaccagatgagcaattcttaggtggtcgtttaatgggggctgcagcaggaattggtggtacgtatggggcaatgccggcattattcttaaaattaaatacattgattagtgaactgaagttagaagaagctaaagatcttcaatacgctattgatgagattatatataagatgtgttcgggtcatggcaatatgtatgcaatgattaaggaaattctacgaattaatgaacaattagacttaggatctgttagagaaccgttagcaccgttaaatgaagctgatttagaaattgctaaagaatcagcaacgatgattacgactgcaattgaaaaatattgctagattttttatctggtatttggatacaaattgtaatcggttgatattataatttttaattagtataacggagagatcctattaatctatcgaaaaagacggcctgcaagaagggcgtctttttatgtgctttctaaagtgcttcatatccaatataatagtaggaaagtcacaatctcggtttttaaaggagttacaatggcaattatcgagcatatcaaacaacaatattcttttttatcgccacaagaacaaaaggtggccctagcggtgattcaaaaaggggcgagcattcagcggattgggattgatgaactagccgctgaactgcaagttagtaattcaaccatttcgcggtttgttcgtaagattggctgtcaaaacttcgtcgattttaaattgcaatttagcgagggcccccaaccaacgatgacgggggttcaaggacaggttgatcatgaatcgcaaacgtccgttgaaatttatcaattctaccaagatgtcatcactaagacacaggcacggattaaacaagcggaccttgatcagttggttagttggatcaaaaccagccagcagctttttatctatggtttgggtagttcaggctatacggccgcggagtttgggcagcgattaacccgaatgggcattcaagcgactgttgtgactgaaagtcatatgatgttgatgacctctcggattattaacaaaacggatttagtgattggtctatcaaattctggtaatacggaagaggtcaatcaagcggtccaaaatgcgcgggaaaatggtgctaaaacggccgcaattaccagtgggactgatagtccattggcagctgcgagtgacttgacgttgtttgttgaagatagcattggctttgccagtgcgcggtttgtgaactcacaatttgcgctgacctatgttatcgatattttggcgatgttacttttagaagatgagcaatacaattggcgaatgaagcaaacagtggatacgattatgcaccacaaacttaaaaagtaattaaaaaagggcgtgtgccataagtcgggatattccgaggattaacacagaatggcgaatgattgctgtaagcaatcgtttgacattcagggttaaccggaagaatatgacttatagaacacgtttatatcatcaatattcggatatcgaaaaaggagctgaagacaaaattacttttgtcccagctccttatttcatggtgtgaataatagcttattgatgatccttgtttgccaacaagtcgcggatttccttcaagtatagttcttcttgagtaggtgctgcttcttcagcaacttcttcttctgtcttcttgcccatgtcgcgaagtttgttgaatcctttgacgattaggaagacgataatagcgatgatcaagaagttaatcacgtcgttgaggaagttcccaatttggaaaacagccttagttcccggaattgtgacagcaatccctgaaagatccacttgaccgacgaataatgaaataattggattgattaagtttttagttaatgaatctacgatactcttaagtgcagcccccaaaataaccccgactgccatgtctagcacgttgccgcgcataataaattctttaaattctttaatcataaagcgatccctccatactattaattgttttcaaggaaaattataccgtattttgcccagagaataaataataatggatggtcgctgacaataaagtgagataatatttgttattttcatgaaaaatcgttaagataggaacgagttaaaaattaaagtaattgaggcctatcgtatgaattggattgtacaattgtaccagcctttctttgaattaaataactggcaaacagttattcgttcttctgaagattggttattgattttaacattggtgattatggaatgcttgctatcagtcgataacgcggttgtgttagctgcacaaacccaaagtttaccaacaaaaattgaacaggaaaaatcactagtttatggtttgtggggcgcttatctattccgctttatcattattggtgttgggactttcttgatccacttatgggagatcaaagtcgcaggttcgctctatttagtttacttagtctatgcttatttcaggaaacaaaaacaacctaagcaagttaaaaaaccgggttctaaaattagtagcccacatcgtttctggcggacggttatctcaattgaattaatggatatcgtcttctcgattgattcagttttagcctcattagcgatttcaagtaaccctgtgattgtcttgattggtgggatgattgggattatctgtatgcgggggattgcccagattattgcgcgtttgatggaaaagattccagaattaaacccgatggcgtatatcttgattctcttcatcgcggtgaagttgttcttatcaattccagcgattgatattgaaattcccaatcttgtgttcgcgggcattgtcttcggaacaatcttgattacgctagggattcactatattcgtaaacaacgagcataaaaaaggaccgacaattgtcggtccttttttttaattaagatggttcaataagactgctagaatcgcaaatagtaaactgcagattgttacaaataataactgatggcgtttcatcgagagaatcgcgatgaattcacggatggttgcgttgggtaagaagtatttcgacgtcttagcgccaataccatcagctttgagatgggcttgtttagcgaatagtccagcacggaaagtgtggtagttgttcgttgagaagataattcggggtttatctttatccgtatcggcttcgataatttgctttgaaaactgcatgttttgaagtgtgttgacggatttttcttccgttaacgtctgttcaacagggatgccatggtcgattgcgtagcgttgcatggcgactgattcagggagcttttcatccccaccttgtccgccggagaagacgagcttcggtgccggacggccttttttgacttggcggtggtagaaggtcattgcccgttcaatccgactggctaacagtggtggcacgtactgtccgtcaattaagccactacccaaaacgatgatgtagtcttgattataccgtggtcggttgaatagatagataatcagtgaagaaagataaagatagaaaaataacgggatgtaaagtagaaaaacggtgctaattgttccgatgaaaatccgtaaatcttcgggcacatggagtaagttggccaacataggcacgaagaagagggcaattaaccctaacccgataaacagggtcagcatgttcgaaagtgtgtggctttcttttttccaaacgatgtaggcgttccataaaaagagtaagaagccaaacaagtagaaaaacaagataatcagaaaggcgacaatcgctgcggcgagggcaatataataaacgttgcgactatccgattgaaaaacgagaatggccagttcaccaaccgccgtggcaagaaagccattaaagacaatcccgttgataaaccgacgcttttcagtcagttgcagtccgacaaacagcgctaagaagatcagcggtaagatgtaaaaatgatcgataaaggtgttcataagtgactcctaaaggattttatttattgagtgcatatttttcgatggcataagcaacgccgtcttgaccgaggtggttactctttgtaatcactttagcgatttttttaagttcaggaatggcgttatccatggcaactggtaagcctgcataagccaacattgaaaggtcattgccttgatcaccgacagccatcacttctgattggtcgatgtttaaagcatttgctaagtcacgtaagccattgcctttacccgctttggtattgaggacttctaagaagtaaggttcactttggacgaattggtaacgatcgaagaaatcagctggaatcttggccttaccttcagctaaaacttcaggatcatcaatcagcatcacttttgaaaaggccttatctggggcaatttcatcaacatggcggaatctaattggcatattgaccaaggcactttcgccaattgtataaggactgatatcgcggttggccgtgtagatgaattgatcatcttcggcatgaaggtgaacgccaatcgtccgtgaaagtgtttcgagttccaagtattgtgcatgtgtgagggtgtggcgcactaggatttcaccagtagcggtattttgaactaaggcaccattaaaggtgattacataatcagaactatctgtgagccctaattcgtgtaagaagggtgtgacgccagtaagtgggcgaccggtacaaagtacgactttgatgccttgggctttagcggctttgaccacttcaatggttttggggctgaggacgttattttcgtttaataaagtaccatccatatcgactgcgacgagtttaattgacataatgagaaacgctccttattgattgtgggggtgcgcttgaatcgcaccattattgatgtaactgttaaattgttgataaattggtgcgaaaacttcgagattggcggtatcgctcatttctttagggaagtaaaaacgctcgtccccagagaacttacccgaaatggcagcgaccaaattactgatagaagaaagctcgtttaattggccatcagattggataatttcaatctgggttttgggcgattttgccgacggatcataagcgtcatacgggagatcaaaactgttgttaacggcggtatagtaggttgcgttatagccggcttgttccgtgagggcccgcatttccggtaagcaatcttctgttgatggattaaatttcactgattttaaaggacggcggctgagaaagcggtccgctaaatcgtttaaaacggtatcaggataatccaaccagtaaataaagtaggtatttaagacgccatcatcgagtttgagatagtcccgcaaggtgaaatcatgttcgaagaaaggaattaataattgaggggccaagctttggtgatgatcaggttgttcgtagagaaatttagcgcgttgtagcaacttttgtaagacgacttccataccacgtgagactgggtgaaaataaacttgttggtacatttgaaaacggctgacgatataatcttcaaccgcgtgcatgccgttggctaaaaaggcaatcccattagcgtagggccgcatgacccgcaaaacacgggttaaatcgaattcaccatatttggtaccggtattataggcatcccgcaatagataatccatgcgatcggcatcaatttgacttgaaatcatctggaccacctggggattaggataagtgtggtcaatgacgctcgccacttttgccgggaaatcaggtgccacttggctgagaatttgattgaccttggtttcaggcgtcataataatttggcgggtaattgattcgtgatctgtatcaaagatgtgttcaaaagtatgtgaataagcaccatgaccgatatcgtgtaataaggccgcgcagagtgcgacgagccgttcattgtcattccaaaggccatcgccaggttgcttggtggggtaattgatttggaattgatcacagatttgacgcgtaatttcataaacgcctaatgaatgggtaaaccgcgaatgttctgccccttggaagacagacgaagtcgtacccaactgtttgattcggcgaagtcgttggaattctggggtatcgattaaatcgagaatcacttgatagtcgacacggatatagttatgaacaggatcgcgaaatactttttcgcgggttagtttttgaggggcataggtcacaaaaaaatctccttctaaggctggtatcctggttgataccggcgcaataattgtgtgttcttggtcagttgtgtttggtagtcggcttcttgcatcagtgtttgtaaatctgattgcaaggttaacccggcatttgattgcaagctagcgcttaattgttggctgacactagccaccgtgagtggttggtgcagtaaatcagcgaggttagccattgtttcgggatgcacatctgggaaggtccaacgcgtttgttgttgggctttgccagcttgatagaaatgctgcattaaagtgccacgtgcttgttggtcgccttcaatgctagcgtatagtaaaatcgcaatcccgtttttggagcgtcgttgcgcaatgccagcgaacttttgcccgttgatactaaggtcatattcgccggggcagtaagaatgttgcacttcaaaatgctcgatggtgatattgctcgtgttgaaggtctcgctaaaaagggtcttcattaattcataagccacattaatagagaggtgatcagcgacttctggcaggtaaaagcccagattgagaataccggtatcggcaacaatgccaagaccaccagcgttccggacaaaatagtgatagcccgcggcggtcaattgatcagtagcagcggtcaattcaggcaatttggtatccatcatgcctaagatgactgttttttcgagtgtccaaaaatgaataattggttgttggcattctttggtgagggccaacagtgtattcgcgtgggcaaaagcgagttgaccttggtcagccgaaaattgttgattaacaacggaccatgttttctggggataaagggtcgctaaatcttgcaaaataacacctcacaattcattaatatacctataattatagcttaaattaggataactgtctttaactaaggcgggattgcttaatcaaaggtggcatggccaatttgtttagcttataatgtaactaatttagaatttagagggagtttatcatggctagcaaaaagagtacgccgattaaaattcatcttgaaacagaaattacacaagatggtcaaaccgaaagccacgttttcgatgaagaaggcgaattgatccaaatgggcacgacgacttatcttcgttacttagaacacgcacaaggccaagaaacggccgtgcgctttaagttagtagaagatgggcaagtccaattaacgcgtggcaccgaaaaagatgcgacacaattacgcctctattttaaaatgcacgatgcacagggctcactttaccaaacacaatacggcaacttaccagttttgacgacgactaatcatttattgatgacattatcagacgaaccacttagcggtgaagttgttgttcattatcaattagaaatcagtcaacaggttgttggtgattacaaattgcgattgatttttaatgcttaaactagtatgattaaggatagactgttgaaaggacgtgtactggttgaaattagacgtttttaaaggccaaaataaagaagaactatcaatgatagaagtcgctcacgcaattttagaaggcaagggcgacacaattgcatttgctgacttaacgaatgaagtccaaaattatttaggcaaaagtgatgaagaagtgcgtgcacgcttatcacaattttatacagatttaaacgaagatggtagctttatttctttaggcgaaaacgtttggggcttgcgttcttggtacccatatgaatctgtcgatgaagaagttaaccatccagaagatgaagaagaccaaccaactaagaagaaacgtcgtaagaaggttaatgctttcttagccgatgtggctgatgacgacgatgttattgattatagtgatgatgatcctgaagacgaagatttagacgttgaagatgaggcagaacttgcagtaacagatgatgattctagtgatgatctaactgaatataaagcagacttacaaagcatcggcgacgatgacgatgatgaagacgacgatgcgcttgaagatggtatcgaaggtcaattatcagaatttagcgaagatgatgatgaagacgaagaagacgaggatgacgatttatagtcgttgctctaatattcaacgttcaaacaaaaaagaggtgtccggacaaatgattttgtctgggcacctcttttttagatttagttgactgtttcaaagtgttgttcataatgcagagcggcccccactagattggcatcgtttttaaaatggcagatttgtaggttgggctgtttgaaggcctgttcaggatttgaatagaagcgtttataaaaattgatacggctatctggggccgtgagcaacgtttcaatatgagtcttcagctctggcagcaaatccgggctgttgctaatgccgccgccaatgccgataatttctggttgataggcagcatttaagaaaatcaggatttcagcgagtgacgcatacatctgatcaacttcttgactagcgatgggatcgccttgtttcgccaattcaaaaacagttttgccatcgatcgtgttaggcagtttgaaattcttcagtgagacagtcttaccaatttgaacgggtgagactttggaattgttgagtgttttgagtgtatcagcgaaccgcttttcaggattatcgaacttctcggcaagattttttaagatgagaccgtcttgaacgatggccaaaccgataccggaaccgataattgtgaataacgcgttttgatgattttggcccacaccgagggtcatttccgccaaagcggcactttcggcatcgttttgtaaggagacggggcggtttaattgggttgcaaaatcgtgttggaactcaccgagatgaagaaagggtacatagctcatgccgtgaacaatccctgtgtcttcgtccggttcaccaggacagctcaccgcaatcccagcaattggttcgtgtgcagcacaaatgtcagctactgtttgatagaacttgttccgggtgaggggtgttggaaactggtcttgatcttcgagtttttgggccgtccaaaagccgtatttaacggccgaaccaccgatatctaatactaagattgtttctgtggattgaaccatagtcgcaaacctccttgattttaacaaccaccctatagtactacaaaaaagcgtctaaaagcagttaataagttaggcgatttttgcttgacgctaaaatagttttcttgtattatattctatgggcgctttacaattatttgtgaagccagaatcggttaacaagctccctgttcattttgaatagggagcttgtttttgttttttgttgtttcccagagaactgaaggattagcattggctaagaagaaaaggagaatatttatatgaccaaatatgtttttgtaacaggtggcgttgtttcctcattaggtaaaggaatcgttgcggcttcactcggtcgtttattaaagaatcgtggcttaaaagtaacgattcaaaaatttgatccatacatcaacgtggatcccggtacaatgagcccttaccaacatggtgaagttttcgtaacagatgatggtactgaaactgatttagatcttggccattacgaacgtttcatcgacaacaatttaaataaatattctaacgtgacgacaggtaaaatttattcagaagttttacgtaaagaacgtaaaggtgaataccttggcgcaactgttcaagtcattccacatatcacaaacatgattaaagaaaaaatcatgcgtgctgcgacaactactgattcagatattgtcattactgaaatcggtgggactgttggtgatattgaatcactaccattcttagaagcacttcgtcaaatgaaggcggatgtcggtgctgaaaactgtatctacattcacacaacattggtgccttacttaaaggctgctggtgaaatgaagactaaaccaacacaacacagtgttaaagaattacgtggcattggtatccaaccaaatgtcttggtttgtcggactgaaaaagcaattccagatgacatgcgtaacaaaattgcgcaattctgtgatgttgaacccgaagcagttgttgaatcacgcgatgcagaatcaatctacgatattccattgttattgaagaaccaaggtttagatgattttgtcttgaaccacttcaagatgacagccccagaagctgacatgacagaatggatcgacatgttacacacaatcaagaaccttgaaggtacaaagaagattgccttggttggtaaatatatcgaattacaagatgcttacatctcagtgaatgaagcattacgtcatgctggttatgtttataacacagacgttaaagtgacaccaattcaatcagaagatatcactaaagaaaatgttgctgaaacattagctggtttcgatggcatcatcgtgcctggtggtttcggcgatcgtggtttggaagggatgattctttcaatccaatatgcccgtgaaaatgatgtgccatatcttggtatctgtttagggatgcaaatggcaagtatcgaatttgcccgcaacgttgccggtatcacagatgccacaactggtgaagtgcacccagatgcagaacacaaattaatcgacatcatgtcagatcaaaaagatcttgaaaatatgggtgggacacaacgtcttggtttgtacccatgtaagttaaaaccaggtactaagactgccgaagcttatgataaccaaagtgttatccaacaacgtcaccgtcaccgttatgaattcaataacgaataccgtgacttgttaacagacaagggcttagtatttgctggtacttcacctgacaaccgtttagttgaagtcatcgaaattccagaaaacaaattcttcgtggctgcacaatatcacccagaattcttatcacgtccaaacaaaccagaaggcttgttcaaagcattcatcggcgcaacaatgtaattaataaaaactcggctcatttgtgggccgagtttttttgtccactgattcacaagggattcaatgtctgaattaattaaaaagttattgctataaactataatttgttataaaacgaatgatattctgagaatggcttgtaatttagcaattaattaattattattatacgtgtatgacttatttagaaacgatataacatgtttttaggtatgttaacaaatcgataatcaattaaataataaacttggaaagccaaaagcgtactttaagttgcaataacttagttaattagtcaacggaagtttgctcttttgttatgaatcgaacggagaaatctaaaaaatgaaaaaaatgttaattcaaggcggtaatcttctatcaggggaagtgacaattggcggcgctaaaaacagtacggtagcaattatcccagcagcgattttggcagaatccaaagttgttctggatagtgtgccgcacatcaaggacgtcaacagcttactatcaattttagaagatatgtcggttacttcaaccttcacgggcgatacggttgaaattgatccgacaaatattgtatcaacacctttaccaagtggtaaaattcaaagtttacgggcttcatattatttcatgggggctttgttagggcgtttcggtaaagcaatcgtgggcttgcctggtggcgatgatatcggaccacggccaatcgaccaacacattaaaggtttcgaagcccttggtgcggtggttaccaataatcatggggcgattgaaattaacgcaccagaaggtttacacggcgctaaaatttatctagacatggcatcggttggggcaaccattaacctattattggctgctgttcgtgctgaaggtcaaacagtcattgaaaatgctgcgcgtgaacctgaaattgtcgatatcgcgactttcttaaataatatgggtgcaaaggttcgtggagccggtactgatattattcggattgaaggggtggcccacttatacggccacaacacacatacgattattcctgaccggattgaagccgggacttacctcagcatggcagctgccatcggtgacggggtgaacgttaaaaatatcattagcgaacatatggatgcttatcttgctaagttagaagaaatgggcgttaagatggatgttaaagaagacagtatttttgtttatccatcacctgatttgaagatggtacaagtcaagacaatgccatatcctggttttgcgactgacttacaacaacccttaacaccacttttattgaaagcacaaggggaaggcctagttgttgatacgctttatcctaaacggacgcgtcatgttccagaattaattcggatgggtgcggatatctcaatcgaaaatgatgttatcttattgcaccatgcggataaattacaaggtgcagaagtatcagccgatgaaattcgtggtggcgcatgtctgatgatcgcgggcttgatggccaacggtgtgacaaccattacgaacgcaagtaatattttaagaggatatgatcgcgttattgataaactaacgggcctcggggctgtcgttaaaatggttgaagaataaccgcgaacgtctattgttttttgttggcattcgtgctaatatttaatggttatgtaaacaaatatctctgacatagtaaatatctcagggcgaaacttaagttgagtgccatttcggtggcacactaactttagtaaaaaggagcggaaaagacatgaaacaaggtattcatccagattatcacaaggttgtatttatggattcatcaactggcttcaagttcatctcaggttcaactgctaactcagctgaaactgttgaatgggaagacggtaacacatatccattaattcgtgttgaaatttcatcagattcacatccattctatactggtaaacaaaaatttactcaagcagatggtcgtgtcgatcgtttcaacaaaaaatatggttttgcagacaagaacgctgccaaataattattttggaaccggggaatttttccctggtttttttttgcacaaaaaagacacgattggacgttcaatcgtgccttttacggttatttaatgcataattgctgaattttgtgcgtaccgatacaagctattagaatgattgggaaaaattgaagcggtaataagaagagtaataatgtcgccgtgacgtacggttgcgctacgatgatagtacagctgacggctactacggttgcgacaagcagtcctggggtgtaggggaagaggactgccaaacttaaaccgattgctgcactggcgaagatggctggaaaaattttaccaccgcgccacccgaaagcaaagatgaggttggttaaaactgttttgccaagtccgattaagagtaagtagccaaacgattgatccaagccggatttggtaaaggttagtaaatagtgttctccggaaaacagtaaatagggggacaatagaccgcaagcgcctaggcaaataccagcgataacggcgagtaaaactggtcggtgaatggtgtcggcaagccactgacaccattgttcgatttttaaaaatagattgccaaaaacgaatccgacaattaatgctaaaataagtaatggccagactgccaatgtccaatgaatggttggcgtgtgtaaggcaaacgggctttctttggggaataattgattgactaaagtaaaaccaagtaaccccgtggccgtcgttagaatatataatagcatttggttgaaatgggatttaaagtgttcgcgaagcggcgttttttcaatagcctcacccacaccagcgaatggggcgtggaaaatagtagccagcattgcgccaattcccatatttaaaaatagtgtttgttggtgggctgttaatttaaggcgatcacccaaccaagtgatcaagccgccgacgatagctgataatgctgcttcgggccctaaactggcaccgcaagctaggacgactaaggccgcaatgatatttttaccgacttgatgctgataggcaacggcgccggtttgtttgaattcgctaagtgtttcgtgcattgttttcggataaggaccccaagaacgctgcattaaaccaacgaggatgccaccgaataatccgatgactaagggataggcaggatggttgaaatgtgaataaccaacttgccaaataaggtgtgtgctgaggttgataagcgctaagaaggcggcggctaagccaccaattaataagcctaacagtaagctgtatagtacaaagataattttaaattgcgtggttttagtggtcgatgatggcataggccctcctaaaaatgggattatttatgcactattatgcactaaccacgtgtatttgaccatagtagaattgtgattaatcatggaggagaataataatgaaaattgatcggctacaagcatttagtgacggggtttttgcgattttgctgacactgctagtgttagattttaagttgcccaactacaagattgggcatttggggcaagctgtaatcgcgcaatggcccattttagcagcgtatatgttatcatttttttatgtaggaacgttatggttatttcatcatgactattttgctaaaattaaacggacgaattggcaactcaatatcttaaatttgattctattgtttgccatcacgctgattaattacccgacgagtctgttatccgaagcagttgcgcaacgaaatttagcggatattcgctttgcattcacaagttatgcactagtggcgttggtgatctcgggtctattttgggtattgtaccggttcatggcggtgcatcaagatttgatgatccatcaagaacaacacgaacaattctaccgagccattcgcaatgatccactacggagtgtgctgatttacgtaattgcattggtggggattcagtttaatgtcgttgtcggggcattattaatcctcttgggaaacgtcttccactttattgcgtatttgcgtttgagtcggaatattgaaaaacatcatttaattgaataaggagtgataaaagtggcaaaacgaacacaaaattggcgctgggtcgattgggtctacgtcttcacgattgcgagtcatttgctatatatcggaattgctttagaagaaatgttaaatcatcccgatcaaaatgcgggtttagcctttacgatggttcaagttgttggggggctagtcattgcgaccttaccaattatcttggaacggtttatgcgttatcgattcccagaaatattatatgccgtttatttagtttttatctattgttcgattttattagggaccgggttacatttttatagtcaaatctattattgggataaattcctgcatattttaagtgctggcttgttggcaggcttaggttatacgattttttcagccttgatttcgagtcatttacgccaaactatttcaccattattgatgagtatctttgctgcaacgtttggcagtacaattggtgttttctgggaattctacgagttcacaggtgatcgcttattaggtctaaacatgcaacgttttatggcaaatggccacttactacgtggacaagcggcattagttgatacgatgggcgatttattagcagatgtggtcggctcaattttaatcgcaatcatcggttatttctgtattaaacacaaccgggaatggctaaataaattaacgtttaccaagaaataagagtgacataacaaccggtttgattctgagcacttgcctaatcgtgcaaataagcgacgtcagtcgattgtttgtgcgacgtagcaaggcacaggagtcaggttgagtaaacgcgtttctaaaagtaaaagggcgctaagacaaaagtaattttgtcttagcgccctttttattagtcgaatttttatcggctaaacgtgttctatcagtcatattcttgcggttaacgccgaatgtcaaacgattgctgtcagcaatcaatcattcgccactctctgttaatcctcagaatatctttgactgatggcacactctttttattaagatgtttttttagccgcgtccgctcgatttttacgaagaacacgggtattttgattgacccaaaagaggttaatcacgactaagacggtggtggaaatgaagactccaccataaccgaaaaagccagaaacgcttgaaccaattagtggtccggcaacgttgcccattgcttggaaggattggttataactgaaaatacggccggcggaattatgcggcgagtatttggctagaatggtttgaacttgtggtaataaagctgcatcggcaatcccgacaagcagacgcaaggcgcctaattgccaaacgttttgaacgaacgcttgggggatgtagacgaagaccgcgaagatcaaaccaccaatcaggattttatcggacccgattcgatcaccgagggcaccaaagcgcggtgcggcaatcagggtcgcaatccccggaatcgcggcgacaatcccgctgactaacgcgacatttttgccatggtccattaattggcgaacgtataaacttaacaacggactaatcgagttgttggaagcttgaataatcattgttgtgacaaacatcccgataattaaatggggatatttaagattttggatcagttgtttaccgggaacttgatcacctttttcgattggtgtgaagttttcatgaacgaaagctaaacagagtaagaagacgacgaataaaatggttccggtaatgaagaaggtcgttcggtaaccagtcatttcagcaacaacgccaccaagtagtgggcctaacagagttccagaaacggtcccagttgtcagggttcctaaggcttgaccactcttttcttgaggagcggaagttgcgatgagggcgtttgagttactgatataaccagaaaataccccttgcaacaagcgaagtgcaatcagctcgtagacgttttggactaagcccattgcccctaggacaatagccattccaagtgaagcacggagtaacattaatttacgaccgcggcgatcggcaattttgccccaccaaggcgagataatggccgttactaagaaggtgatcgagtaggttaacccactccacatactcagttgtgcggcggaaaaatcgcctaacgtatctatataaagtgacataaatggcatgatgaggctaaaggcaaccccggccatgaaattcccaaaccataaaacaacaaggttttgctcccattgttctctgggtctgaataaacgttgacggatatgagtcaacatgaaacaatcatctcgattctaatgagttaaagcggcgaccattgcttttgataagcttggtaagtcgctagtagtgcaggttgttgtgcaaaaatttgtgtcaactgttgactcttagcttgaggcaattggcgtttaaaatataaacgttgtgtatggtaggcatctaatgcgcatttttgctgttctaaggtactagattgcgcgaaaaagagcagccagtctaaataccagtctttagggctatcagcctcataaagcgctagtagcaccattaattgttcagcaggtgcaattaataggtagtgattacgttgcaacggcgtcagcgtcaagtcatcggtttcaggaacaacaatcggtttggtacctaattgtgcgagaaactgggaaaaagaggacgcaacagtcaaccactggtcaacttcggtatcaatgtagcgaatgctggggttatcaggtgattgttgataatcgaacgcaaaatattgcgtaccgtgttgactaaatggtatcaaataatcaggccattgcgccacttctatgactgtttgtgaacccgttgcaataccagcgagataatgacactcaacgtggtctaaaccatcactagttggttcgctagtggggagactaaagcggcttaaaaagccaccgttagtttcttggcacaatgcgacatattccgccggtaaagccgcgttaggtttgataaatcgcggatcaatcagcccgctatccgcaattgttgggtgtgcagaaaacatgtgagaccttcctttgctaatagggatatctctctagtttaccactaatcggcgatagttttgaattttgttaagaataataattctgctttatttgtgaataagagtctgctactatgaagacaatatcaaaagaaaagaggattagtttatgctatggttagttgtgattattatattagtattaatcgttgggaccgttgcgttttacatcagcacgtataatggcatggtcaaaagccgcaactgggcggatgaatcatggagccaaatcgatgtgcaactcaagcgccggaatgatttaattcccaacttattatcaacggtgaaaggttacgctaaatacgaacaagaaacatttaccaaagttgtagaaatgcgtaatcaattattagaaatgccaagtgatgatcgtcaagcaacgatggctgtttctaatcaattatcagaatcattgaagagcatcttgtcattaacagaaagttatccagatttgaaagcaaatgctgaatacatgaaattaatggaagaattaacgaatactgaaaacaagattgcttacgcacgtcaattgttcaattcaagtgcaactcgttttaacaataaaattgaaactttcccaggcaacatcatcgctggggcacataacttccaaaagacggcttacttagcaacgccagaagttgaaaaagaagtgccaaaagtttctttcgattagagtgtgatctgaaatgttatatgaacaaattgcacagaataaacgacggaccgtctatgtgatgattggtttcttgatgcttgtactcgcaattggtgcggcattaggctatctcttcatgcaaaacaccttgacgggtgtgatcattgcggcggtcttagcggccgtttatatggtaatgatgattagtaattccactaatgtggtcatgcagatgaatcacgcgcacgaaattaaagatgccagtcagtatccagatttgtggcacattgttgaagacatggccatggtcggtcagattccgatgccgcgggtttttatcgtcgatgatgatagtcccaacgcctttgcaacgggtaatgatcctaaaaatgccgcggttgctgtaacatccggtattatggcccggttaaatcgtgaagaattagaaggcgtgattgcccacgaagtttcacacatcaagaactacgatattcgcttatcgacgattgctttggcgttagctgcggtcatctcgttacttgttaatatcggtagtaatatgatgtggtggagcggcggtcgtgatcgcgatgatgaccgtgaaggtggcgcaggcaatgtgattgccttagtcttttcaattcttttaatgattctggggccattagcggctagcattgcacagatggccttgtcgcggaatcgtgaatacttagcggatgcttccggcgttgagttgactcggaatccagaagggttaatcaatgccttattgaagatttctaatagtgaaccgatgcaagctgcggatccgtctagcgcggcgttgtatatctcagatccgtttaagggtcgcggcagctttggtgcgcatttatttgatagtcacccaccaattgaacaacgggtcgaacgtttacgtaatatgtagtagttattaattagcttaaaagagactgatcgcaatcatttgctggtcagtctttttttgtgtgaaactttcggcgtctgactgattaacgggtataatgaatgtaaggtggtggggatgatggttaatcaaaaattacgacgattaatgaatttacagacggtactgatcacgcaattgcaagatcgccaaacaacggcagtcatgcggcaaatgatacaacaacaattattgccacaagtacgtggtcaattgctgttggcgttacaggacaagcggttatttcaactgccaactgcaacccaaacaaagctggaacagttgttaattcagaatttgattgagccaagtaatggtacggccttaagtgcgctttggctagagacaacccaattacggtaccatcttcccaccaaaaacggactggtcgctcattttgcccagttagagttggaaaactgggatgataacagcttgcgggcttatgcgagcattatcagaaaccaagaaccgttgtttaatttaacggctgccaatcgtgcgctgcatcgtgtggggtcaccactttatcagcaactatatcaggcttatggggaccgaacaacgaatcggttgattaattggcagcgagctaatttagttttgatgcagttgggggcgcaattagatgcgcaccattttttacaattagcggcagaagattttgaaatctattcagaaatgccaccggacgcgccatttttaaagacgtttgcgcagagtgttcaacttgcttttaaagaccaggatttgacggatcagcggctgcatcaatttagaatgtatctggatcggcaaaatattcagtatattcgaacccattttaagactgccggtgattctgatgaaatggcactccaaaaattcgtcgcgcaacggcaaaggaagcagcgggcgtattggttgaaaagggaaccggcccgcttgcataataaatatatgcgcggtgtcacttttaattcggatactaacttgaatcgtaaacggttgacgcctgattttcatagcgaatttatcattgatcgaactgggcagtttgtgacgcagtgggatgtgttacggtatcggacacctcatcaaattgaaagtgatccggcacagtatgtattgaatattgccgaaaaaaatgcgttattaaatggcgaatctttcaactatgctaaccgcaataatttacaacatgcccaactggatagtcgaccgccacgccaattggatcatcaattacgcgaccgggcttttgccggctggcagagtcctaataaacaacaatatcggcaatcagcagaaaaaagtgatgcctattcacgaccttattaacggattggtcggctagaatctgctgttggtcttttgaaaatttatggtacaatgttgcgtagttaatcacgcgaaatagtcgtgtgggctttttataagaatcataaaaataagattgaaagcgtgggcttttgatcactaaccaataggagctatttaagatatgaaaatgcaattgagcgaaattgcacggatgactggtgcgaaaaatgagactgaacaatgggcgacagtagaagtgacaagtgttgcttttgatgcgcgtgaattacggccaggggcgttatttgtcccactagccggtaatcgggatggtcatgattttatcaatcaagcacgagaaaacggtgcggtagcgacattatgggccagtgcacgtgatgatcaaccaactgattttccagtattacttgtgaaagatccgctagcagcgtatcaacaattggctaaacggtacttactaaagattaatcctaaagttgtggcgattactggaagtaacggtaaaacaaccactaaggatatgacagccgctgtattgggcagtcaatataatattcataaaacacaagcaaactttaataatgaaattggtgttcctcagacgattttgtcaatggaagccaatactgaaattctcgtcattgaaatgggaatggaccgccctggacaattgcacgctttaagcgaaatcgcaatgccagatgtggccgccattaccatgattggtgaagcacacattgaatttttcaaaacacgggataaaattgccgatgccaagatggaaatcaccgactttttaaaagaagacggcttattggtgtatgacggtgacgaaccactcttaaatgaacgcgttggcgatttggaacgtgaaacttttgggagtgcgacaaccaacacactttatccaattcaagtccgtgctggtgaaacgaagacgcaatttaagttgaatgcttggccagacgtcgcttttgaaattccaatgatgggtgcgtacaacgtcaataacgccttagccgctattttaattggccaacattatcacattaaaccagaagtgatgagcaaggcgttagctaattttgaagtaacgcgtaaccgaacagaatggttggtcgggaccgcagggcaaagaatgttaagtgatgtatataactcaaatccaacagcggctatcgaagtgttacgcaattttagccattttgaaactgatgggcgccgaatcgccgtcttaggggacatgttggaactcggaacagctagcaagaaacttcatgagagtttggcaacggtcttagatcctgctcaaatccaagaagtttatctatttgggacggaaattaaaccactattcgataagctcgcaacaatttatccagcagaacaactacactattttgaaaaaacacagcaacctgaattaatcaccgctttagcagaaaccatccaaccagccgatttagtcgtcttaaaggctagtcatggcttgcatttagaaaaagtagtggctgctttgacgactgagaacgattaacaaggaaaaaagaattttagctgattcatttacagcggtagagtcgggttcgcacgactaattaatgtcataaaacaatgaatatcacccataatcgggttaattccgtttgctaattaatggtgagcgtgataagctattaaggagcttttttaatgaaaaaggctcttgaaaacaattatattacaagacagatttttgaaaatggtgtaactgatgaagtggacctgttttgtaatggcatgttttttacaaaacaaggaggaacactatttgaaattctcagaattaggtctatcagaaccaatcatgaaagcaattagccgcgcaggctttgaagaagcaacaccaatccaaggggaaacaattcctttggcattagctggcaaggacgttatcggccaagctcaaacagggactggtaaaacagctgctttcggtttaccaatcttacaaaacttagatttagataacccggatatccaagcattaatcatttcaccaacacgtgaattggccatccaaacacaagaagaactttaccgtttaggtcgcgaccgtaaagctaaggttcaagttgtttatggtggtgctgatattcgccgtcaaattcgttcattaaaagatcacccacaaattcttgttgggacaccaggtcgtctattggatcatatcaatcgtcggactgttaaattagatcacgttaaaacattagttttagatgaagctgatgaaatgttagacatgggttttgtggatgatatcgaaagtatcatcaaacaagtacctgaaaaacgtcaaacattattattctcagcaacattacctgcaccaatcatgaagatcggtaagagcttcatgacaaatccagaaatgatcaaagtgaagtcaaaagaattaactgctgacttaatcgatcaatattatgttcgtgctaaagactttgaaaaattcgacattatgacccgtttgttcgatgttcaatcaccagaattaacattgattttcggccgtacaaaacgtcgtgttgatgaattaacacgtggtttgaaggctcgtggctacaatgctgaaggtattcatggtgatttatcacaacaaaaacggatgagcgtcttgaaatcatttaaggctggccgtttggatgtcttagttgcaacagatgttgctgctcgtggacttgatatctctggtgtaacgcatgtttataactacgatattcctcaagatccagacagttatgttcatcgtattggccgtactggccgtgccggtaaatcaggtgtttcagttactttcgtgacaccaaacgaaatggaatacttacggattatcgaagaattaacgaagaaacggatgttacctttacaaccaccttcagaaaaagaagccttcaagggtcaattagcagcagctgttgctgatatcaactcaatgattgaaaaaggccaattagctaaatacaacgaagaagctgaagaattattaaaacaattctcagatgttgaattagcttcagttcttttgaagacaatcagtaaagaagccgttccagttaagatcacaccagaacgtccattgccttcacgtaaaaagggtggcaaccgcggcggcagtcgtggtggtaatagcggcaatcgtcgtggcggtaacggcggtggttatcgtggtggtaaccgtcgtagtagtggcgatggcaaacgtcgtggcaacgacagcagcaaagatggccgtcgtagcagcagtaacggtgatagcagcaaacgtcgtagtaacgacaatcgcggcgacagccgtaagaagactgatggccgttcaaaacggaacttcacaattcggacaaatgataaataattaacgtttaatagcgtcctaccaattttggtggggcgctattttcatatcatgatgtgacagagctgtaagttttttccgcatcggctttgtggtaaacttaatagaaaataggctactaggggcgaatactgtgatagttggattaggaattgatttggctgaaatcgaccgatttgaaaaagcacaagagaaaaatagtcgttttgctgaaaaagtattaacggcaactgaatttgaactttttagtcattatactggtcgtcgggcactagaatttttggccggccgttttgcagtcaaggaagcctttagtaaagcttatgggacagggattggccaggtgaaactgcaagcagtggaaacgctgaatgatccccagggcaaaccgtacatcaaccaagatttatttgatggtgtggttcacgtctcgctttcacatacagcaacacttgtgatcgcagaagttattttggaaagaggttaagacatgacagtcggctacttacgaccaacgcgcattttagttgatcaaaatgcaatttatgaaaatattcaaaacgaattaaaacatcttgaagggacagataccgtgatctttccggtattgaaagccaatgcttacggtcatggcctcataccagtcgcggaggccgctcaagccgctggtgccgctggtttttgtgtggcgctattagacgaggctttagcgttacgtcgggctaatttcacggaaccaatcttggtccttgggattacacaacctagtgaaattgaattagctgctgccaatcaaatttcattgacggtcggttcgctcgaatggttacaagaagcagctgcaattgcccaacaggtaccttatctccatccagtacccatccatttgagtatagacagtggtatgggtcgaattggcatgcgcgatgaagctgagctcttagcagcctatacctttatcaaagcatattctgattatttcgatttcgaaggggtattcacgcattttgcaacagccgatgatcctgatgatacttattttaaggaacaaagcgcacggtttaatcagctaatgacggctttaccggaacggcctagatttgttcatgtttctaactcagcaacgagtttatggcatgcggcatgtaatggtaatattattcgaatgggcattagtttatatggtcttaatccttctggtaatgcgattcctgatttaccttatccgcttaaaccagcacttgggattgaatcagaattggtctttgtcaaacaagttgcagctggcaccaaaattggctatggtgcgacttatgaagcatccaaaggtgaatggattggtacgattccaatgggctatgctgatggctggttgagaagaatgcaaggttcaacagtcttggtagatgggcaacgttgtgaaattgtaggccgcatttgtatggatcaaatgatgattcgcttgcccaaacgttatccagtagggacgaaagtggtctttgttggtaagagtggcgacgatgaaatcacactacaagaagtggctgattatgctgatacaattcactatgaaattatctgtgatttatcagatcgaattccccgtgtgtataccggattaaatgaacactaacgattaacaattttgcttatcttcatttctgtgttaggataaatacaggttaaaaagtgttgatttcggaggctgatgaagatggaagctaaccacgaacaattatccgttaacttagacgttaaattagtacaagagattaaaacctattgcgaggtttacggccttgatgagaatgatttgattcaagatgccatccatgaatttatggcaacccggcaagcgaaggttgataacgtcattaacggctatgtcgaaatggccaatcttaatagtcaaatcgccgctgaattcaacgcttgtgaaagtgaggcttacgcccgcattcgcacagttgatttatcctaattggagggatagaagtgggagaattgatacaacgcggtgatatttattatgcagacttatcaccagtagtaggatcagaacagggtggcatgcgtcccgtgttaattattcaaaatgacgtgggcaatcatcatagtccaacggtaatcgtggcggctattacggcgaagattcaaaagcctaagttgccaacacatgttggtatcacagctaaggccaatggtgttgagcgtgattctgttatcttgttggaacaagtccggacgattgataaacaacgcctcaaagacaaggtcacgcatttagttgctgagaagatgcgtcaagttgatcgcgcgttaacaattagcgttgggctccaacctgttttgaatccttaatacataagttagtgcgagagtctcagacaaggtgtctgagactttttctttttgatatcgagtgttcagatgtgctatgatagtaatcgcattgaaaaaacgtggttcgtaaccatcccacgctaaaaaaactaggaggattattaaatgactaatcaaaatcgcttgcgtagtgtgatcttaaatggcttagttgctgcgctatacgtggtgttatcactatttccaggtgtactgggccttgcttctagtcccattcagttccgagtatcagaagggttaaaccatctggttgtcttcaataaaaaatatttatggggcgtttttgggggcgtgcttgtcttcaatttcttctttagctctgaaaataagattttggatacgttatttggcggtggccaaactctgttagcattacttgttttaacgcttgtgatgcctcatttgaaaaaaacgtggcaaaaaatgttagttaatatcgttttattcacggtatcgatgttcatgattgcttggatgattgttttaactggctcaacggctaaaacgcaaatcccattctggccaacgtatgccacattggcgatttctgaagctgttatcatgacgattaccgcaccaattatgtacgcggtcgatcaagtcttgcattttgaacgacaaatttaatagcaaaaaaaacggcgctaggacaaaagtaattttgtctttagcgccgtttttactatccgaacattgatggtgtaaacgtgctttttgaaactgacttctgcgcttagcgtcactcgtcaaacaactgcttgcagcagttattcaccgagctgtgctaatgctcaaagtcaaagcgtttcaaacgcactttttttagtttaaataacattttcaatttcgtcagaatcattacggagaactttaccagattgtaagtcatcaatttcgggcactttaaagccttttttctcaagtttgttagtgatcttcttgagaatttcgatgtctaagtcactaggaagtgtgaagagtgtgcgtcgaacgaattcgtcttgtttggcatctaaggtcatgcagctggcaatcgacgtgtatttggcgataatcttcgacatggcaactaaatccccttgttcaccggcagaaaggaccgtgagcacataactactaagttctaagttccaagcttctgaaagcatattaagtagagtgctatgcgttaaaataccaaagaagttactgtcttcatctaatacggcgatgtaaggtaaatctttgatattgaagaagaccttgaaaaatggcgcatcaactggaatgtatttcgtcatattcttcaagaggcttgtgacgggcaattgcatgtcgcccccttgagatttatgtcggtagatgtgcattttataaatattaccacggaaaattttaccgctggcatctaaaacaggcacacaacggtaaccggaatcttccaaaatcgttagggcttcttcaagtgtcacggattcttcaatcgtggtcagacgttctttgggtaacactagggatttgattaacataagcatttctccttagattaaaattctctcatatactgatgtaatcatagcataccattgacgtaattaaaataactagtttttcgacttggcgaaaaaacaattaaatattaatgagatttaaaaaggccctaaaaagacaaccgcatgaattgctttttaggaccttttttaagttgttttagatgacgaccactggaatcccttcactaacggtattgtaaagttgggccataattgttggtggggtattgatacagccatgtgagccatgttctttataccaagtgccaccatatttaggttgccatggtgaatcatggataccgacacctgtttcatcaattggcatccaataattaacaggacttgcatactcactgacaccgtcaaagttagtgcctttgagcgtggcgtttcgttctttcttccaaatactccaaacaccacttggggttgtttgaggtggtcgtgctgtgacgacgtctgtttggattgttaccttgccattttggtagagccacatatgttgggcctttttatcgatctcgatataagttgaaccaacgctgcgatctttttgcgtcatcccagaaccacgaataacagcagttctagagaagtctttaccttcagggacttctttcatgagggcgctaatttcatctgcaggtgagatgctccaaccgtaaataccggcaggcacagtaactgttccttgtttcgttgatttaaaggttaatggtttatcataagtatcgtattttgtcttgagttgataaacgtaattagaaacggcagttttatcaagtgacaccgcaccgttgttattaactaaccaaccttgaatggtggccttagggactgtgaattcattaccattaacggaataatgaattttttcatcactgatggtcgtcattttcttagccgttttttgaagcgctgaatcggtcgatttaatagttggaacggtatagtcttgttttaaatcaatggaggttttaccttgattgattgctttgttaattgtttttccaaattgtgcttggtcgatttgattaccattgacttctttaacgatctcaaagtttccattaactaacttaatcgttgcattcttagaagctgttcgaccagtatttaatttagcaactgtctgatttgcgaattgtttaaaagtttgttggtttaaaataagggaattttcagactgcaattttttaggattacttaattgatgaccaagccaagaccagccgttttgagaagactgaatcttcttcaaaagcggttggaaattatggctaaaaccagcatcctttgctgtaaacgataagcgggtcgtttgatcttcttttaacgtgaatttctggtggttaacttgcttgagtaatgcttcattagcttcggcaggcgatttaccactaatgttagtgccggcaacaactgtattgggtaaaaatactttgttgtagtggagactcatggcagaataaccgccgattaaaataacggctgcgacgcccaaagcggtataagctttctttgaaaccttcacaacatcaactccaatctttctgatagattaatcataccctaaatagtttttaattacaaaggacgttaactaatagtaagcatactagaaagtgagctaaaaagaaatgcgaaagcttgattattagataactttaaggaacaacgaataaagggcttaacaatctaatgttggcaggcgcacttattaaaatcaaatgaatggttgttacaagaaaaaatggtcttggtcgttatttcagatgaaactaatgacttgataagcgccaacaaagtttgtgaagaaatttcgaatggtaagataaaaactaaataaagatattaatagtattaatatcttgtgttaatattttaacaattaactattgtcaacgatatgggattgcgatatgataagtgatgttaacaatattagaagggctctagataagtggtttgatgattttgataggtttaatatttaaggatttttgaatggaagtagctgtgaatgaaatatagaaataaatttcaagtgttttaatcataatttatattttatacataggtatttcggtaactaattaccggggttgaccaaataattaaaattataatggtatacgccgtatacgtatatcaaacatattaaaacagctattttacgtaggaggtaagatagtggtcggtaaagcagatacaagaatgcaattattaggagaatggtactcaaagctacaacaaatcgcaacaaagttaaatgcaattagtcgcaaatacgatgttagttttgaacaatttttggtgattgaacaaattattgaagaagaaagaaaatcaccaagtgaactcgctgttttctttaaaacatccttaccagcagtttctagaaaattaaatctcttgcagtctaagcgattggtttataagattcgtggcgaacaagatgaccaacgattaatgcgcgttaatgcgactcccgagggcattgaaacctatgaatcaattaaggcggaattactcacttgggacgcacagcttaaggatcatgatattaatttgatggcgatggtcaatcatacgttggaacacgctaattaaaaagagacattaaaaaaggggtcagggcaaaaattaatttgtcctgatccctttttgatcagcaataatcgagattattggcgagtttcgatatctaattcttcaaaagcttttgtaacgatatcttttaattgttttgcagatttgtgcatgctttccatttcgtggtctgtcaatggaatttcaaggatgttagtaatacctgaacggttgataacagcaggtgaaccgataaagatatcgttcaagccgtattggccatccatgaatactgataatggtaagacagcattttcgtcatctaagatagccttagtaatacgagctaatgcagtaccgataccgtagaatgtagcaccttttaagttaatgattgtgtaagcagcgtcgcgaacactttcgaagatcttaacgagttcttcttctttaacttctggatgagctttaacccattcagaaatcttgatgccaccgatgttagcatgtgaccatacagggaattctgtatcaccatgttcacccatgatgtaagcatggaccgaacgtgcgtcaacgttaaccatttcagcgatatctttacggaaacgagctgagtcaagtgatgtacctgaaccgataacgcgttccttagggaaacctgataatttccatgtagcgtaagttaagatatcaactgggttagcagcaactaagaagataccgttaaagcctgattcaacaataggatcaacgattgtcttcaagattttaaggtttttgcttactaagtctaaacgtgtttcacctggcttttgtggtgcaccagcagtgataacaacaacgtcagcatcttttgcatctgagtattcagcagcatagattttcttaggagaagtgaaagctaatgcatcagataaatcgattgcatcaccttgtgttttttctttaaagatatctacgataccaacttcttgtgcaataccttgtaatgttaaagcataagcgtagctagaaccaacagcgccgtcgccgacgaggataactttttggtgatctttttcaatgtttgccaatataatgacgtcctttctgtaaaacaattcttcatttcgaaaaccagtatagcataatttgcatgaaagttcgctaattttgtttaaattttcagaaaactatttatttcctaatatagaaagaaaaacgggtatggtataataaacagcaataacaaacgtcgactggggagagcaacttctcagtatttttgcgttataacggcgattttgaagaagaggtaagacaaatgaagatgattgttggtttggggaatcctgggagtaaatatgcaaaaacaaaacacaatattggctttatggtaattgaccaattatgtgaaaaatacaacgtaacactcaataaacatgattttgaagcagaatatggcagcttcaaatacgaaggtgaaacagtcttattagttaaaccactgacattcatgaatgactctggtcgctcagttggcccattgatgagttactaccaagttgggattgatgaattattagtcatccaagatgatatggatttaacgatgggcaaattacgcctccgccaaaagggttcagcaggtggccataacgggattaaaagtattattgcgcacacgaagagccaaaccttcaagcggcttaaaatcgggattcaacatcctcaaaaaagtacggtggtcaattgggttctaacaccatttgataaagatggcgcaccagtgattaatcaagcgattgatcaagcctgcgaagcaatcgacgactggtgtcaaaatgacgactttatgaagacaatgaataaatttaattagagtgcttttagtgcttgtttagattttgagcactagcctagtatcgtgaataatcggtgcaaccgattgtttacgatgcgtagctaggcgcagaagtctagcactaatggcacgtttaaaaattagagtgcttttagtgcttgtttagattttgagcactagcactaatagcacgtttaaaggccgtatcgcccatttctaccagtcacaaaattcaagaaagtaagggaccttttgaatggatttaatttcaatgttgggtaacacccagcaagtgcaatccgtattagaaaatcaaaagccaggcgtcagacaactgcttacgggcctttcgggctcagccaagacgctttttttggcaacgatttataaacaacagcgtcagccgttattaatcattgaaagtaatatgtttcaagccaatcaggttgctgaagatttagccaatcagttaaatggggaccagatttatacctttcctgttgaagaagtgatggcggccgaaattgcagttagttcaccggaatcaagagctgaacgtgtacgaacgttgagctttttggcgacgggtaaaaaagggattgtcgtgacgtcagttgcaggaatgcgacggttattgccaactgtacggcaatggcgtgatagtcagacccagattgaaatgggcggcgaagtcgatccgaaaattttaggcgcacagttagccgaaatgggctatcatcgcgataaattagtcggtaaacctggtgagtttgcaatgcggggcgatatcattgatattttcccccttgatacggaaaatccagttcggattgaactgtttgataccgaagtcgatgcgattcgttcgtttgaggcggatacccaacgaagtattgaaaacctcgagagtgtcgctatcatgccggcgactgatctattagccaatgcggcacaactcgaaatggccggagaagcattgcaagccgattatcaacaaacagcagccaagataacggcaaaagatgatcaaaaggcgttagccgtgaacttcgaaacgccgattagtcgattattggcaggcgagcgcttggaaaacttagcactcttcgtcgattacctttaccccgatcatacgagtctaattgattactttaaaaacagcgggttagtggtttttgatgattatccccgcattcaagaaacacaacgcgtcttagtggaagaagctgctaattggcagactgatatgttgggcagtcgccgcttactaccggcacaaaagctattagtcgatgttcatcatttaatgaagcaagaccaacatccgcatttatacttatccttattccaaaaagggatgggcaagctaaaactagatacgctcggcaatatgccaacccgcaatgtacaacagttctttagccaaatgccattgttaaaaacggaaatgagcaggtggcaaaagcaacaacaaacagtggtcgtcttagtatcagatgccaaacgagtgaagaaaattgaccaaaccttccacgattttgagattgaagcgacggtcacgactaaaactaagttggtggctgggcagattcaaattgttcaaggctcattgcaaaatggctttgaactaccagatttaaaattagtcgttctgactgaaaaagaattatttaataccgcaccaaaaaagaaggtgcgccggcaaacgttagccaatgcggaacgcttaaagagttatagcgaattaaaaccaggcgattatgtcgttcacgtcaatcacgggattggtgaatacgtcgggatggagaccttggaagtcgacggcgtccatcaggattacatcaccatcttgtaccgggataatgggaaactgtttattccagtgacacagttggacatggttcaaaaatacgtctcggctgaatccaaaacacctaagattaataaattaggtggggcggaatggcaaaagactaagagcaaggtttccgctaagattgaagatattgcggatgatttaatcgaattgtacgcgcaacgggaagccgaaaagggttatgcctttcctaaagatgatcaactacaagccgacttcgaaaatcagtttgcgtatccagaaacggatgatcaattacggagtacggccgaaattaagcacgatatggaaaaagtacgcccaatggaccgtttgttggtcggggatgttggttttgggaaaaccgaagttgccttgcgcgctgcgtttaaagcagtcgcagccgggaagcaggtcgctttcttggtgcccaccacgattttggcgcaacaacattatgaaaacatgctagcgcgatttgcggattttccagttgaactcggactgttatcacgatttaaaacgcgtaaagaagtgacggctacgcttaaaggcttggaaaaagggcaagtggatatcgtcattgggacgcatcgtctattatcaaaagatgtcgtcttcaaggaccttggcttattaattgtcgatgaagaacaacgatttggtgttaaacataaggaacgactcaaacaattaaaggcgcaagtcgatgtgttaaccttaacggcaacgccaattccacggacgttacacatgtcgatgttgggtgtgcgggatctttctgttattgaaaccccaccaactaaccggtaccccatccaaacctatgtgatggaacaaaatgctggtgcgatgcgagaagcgattgaacgggaattggaacgcaatggccaagtcttttacctgcacaatagggtcagtgatattgaacaaaccgtcgatgagattcaagcgcttgtgccagaggcaaccgtcggctatgcgcatgggcaaatgacggaggcccaactagaaggggtcatttacgactttgttcaaggtaagtatgatgtgttggtcacaaccacgattattgaaaccggggttgatatgcccaatgtgaatacgatgattgtcgaagatgctgatcactacggcttatcccaactgtatcaattacgggggcggattggccggagtagccgggtcgcttacgggtactttatgtataaaccggataaggtattgaccgaagtcagcgagaagcgtctgcaggccattaaagactttactgaattaggttccggcttcaaaattgcgatgcgtgatttatcgattcgaggcgcaggtaacttattaggtaaacaacaacacggctttatcgattcagtcgggtttgatttatactcacaaatgctcagcgaagcagtcgccaagaaacaaggcaagaaagtggcggctaagactaacgctgagattgatttgaagctcgaagcttacttgccggatgattatattaatgatcaacggcaaaaaattgaaatttacaaacgaattcgccaaatggatacggaagcggcctttacggaaattcagagcgatttaatcgatcgcttcggggattatcccgttcaagtcgcgcatctcttaacgattggccaattaaaaatgaatgccgatgatgcgttaatcgaaacgattaaacaagtcaaagacaagattcaagtcgtcttatcaccaaaagggagtcgcttagtttctggtgaacagatttttgaagccttgtcagcaactcgcttgaaggcaacggtcggttttgaacaagaaaaattaagtgtgacgttaattatccaacctaagatgaagactggcgattggttacgtgagttggcgatttttgtggaaacactcgttgaaatcgaaaagaagcagttggtaaaataaccgctagttactggtagcgattatcggagggattcgatgcaaaataaacagatgcaacatttaatgaagggcgcagttgtcttatcaattgcctcctttgttgccaaaatattgagtgcggtctatcggatcccatttcaaaatatggttggcaacaccgggttttacgtttatcagcaagtttaccctatctatgggattgggatgacgtttgcgttaagtggtttcccagtttatatctctaaaattgtggctgaggaaacggccccggctgaacaaacacagattttacggcgatcttttgcgctattagggttattcggcgcactgatctttttatacctgcaatatcaagcaccggcaattgcggtggcaatggcggatgctgaattagcaccgttaatcagaatggtgtcatacatgttcttattgatgccgtttttggcggttacgcggggttatttccaaggcatcttcaatatgattccaacggctacgtcacaagtggccgaacaacttgtccgggtggttgtcattatcctagcagcctggttgtcactgaagctacactggtccgtttatgaaatgggaacctgggcgatgtccggcgcctttttcggaggcttggtagcaacagttgccttattgaaaccggcggaaaaagccttcgtgctcagagggacaaaaccgaagggcattaacctaggtgcgtaccgttcattggctaaacgcttattaatagaagggggctcaatttgtctgtttgcttcattaatagtgttattacagttggttgattcattcacggttaaaaaaggcttagtggccagtggcttaaccgaggattttgctaaaaaccttaaagggatatttgaccggggccaaccgctcgtgcaattaggcttagttatctcaatggctttttcatcgacattgattccaagtctttcgcgggcacggcaacaacagcaagaccatcaattccaacaagtcgctgaatcattgattcatatcagtttaggcctctcggcggcggcaacgactggtttgatgattctcatgccacaagtgaactacttgttgtttggggatgcagatgggaataaagccttagtgtggtacatgctaagtattgtcattattgcgctaatcaatgcctgcaatagtgttttacagagtttggatcagttccataagacgacgattgcgctattaatcggccttttggtcaaagtggtcattaatcaatggttggtacaacacttccaaattgtgggcgcgagtgttgggactgttattagtttaggggttgtgttagccttaatcttacggcaatcaccagaattggtgcgagatgccttggacggccagcattttacaggtaaattggttttgatctgtggcatcatggctgtagcggtccgctttgtggtaaccgtcattcaacctagtctggtctcaaggggccaagccgttttaggtgctggcgttgggattgcagtcggggtacccgtctttatcagccttgctttagcgtggcaattattctcaattcgagaatggttaacgattccgggtggtaaacagttgctgaaactagcacaaaaattaaaaaggtaggcgacactaatgagattagataagtttttaaaagtatcacggattattaaaagacgttcagttgcaaaagaaattgcagataaaggtcggattttaattaatgatcgtcaagcaaagtcttcaagtaacgtcgttgttggcgataaattggaaattgggtttggtaacaaaaccatgattgtcaagattacgcaaattatcgaaacaaccaagaagagcgatgcggcagaaatgtatgaaatccttgaaactaaggttgcagaaaattttgaataaggtcttttaataggcgatattagtggtttagtccaatttgttaaggataatcactaatatcgcctattttcgtgatattggttgacgttgtttttattaacttgctataataaagggattacaaccagtgattggaggggctaacgtgagtcgtaagataacgcaaattgaaaatgcctatacgaaacagcaggcggctaaacaaaaggttgaacaaaaatcgaaacggacacggacggttcataagcgtcgcttattagcgttgggtgtcatcgcgttaattctttttagtgtctgtggtgttcaaatcctgcaaacccaccattctctggcattaattgagaagcaaacagttgttaaaaaacaatccttaaaaaaggccaaagccaaagaagcggatttaaaagtacaggtctctcagttacataatgatgactacttagccaagtatattcgctacaaatattattattcaaagaagggcgaaacaatctatagtttgcctcaagataaggcaccaaatttaaacgaacaacaaaaataatttcgttttacagccttgtttcaagggtaaagcgtgctatacttattttattaaatatcacaagtttgtgattaaaagtttgacgagttcaaacgaccatttaggaggacgtagttttatatggcagttgaagttggttcaaaagttcctggtaaggtaacaggtattacgaattttggcgctttcgttgatttaggagaaggcaagaccggattagtccacatcagtgaagtttctgatagttatatcaaggacattcacgatgtcttaacagttggggacgaagtgactgtgaaggtgatgtcagatcaaaacggaaaaatcggattatcaattcgaaaagcggttgatcaacctaaggtgcaagagcatactcggccacaatctagtcgtccaaataacaatcgcggtgggtatcgtaaacctgaacatacaagtgcgcctaagaaggaaggctttgacgatttactatcaggcttcttaaaagatagtgaagatcgtttgtctactattaaacgcaatacagaaggtaaacgtgggggccgtggcggtcgtcgtagttaatcaaaaatcatgatagaggttgggttgaaagtttagtgaatagacttttggcccaacctctattcatttgaaggagggttaagatgcttgaacaagcttttcaaaacgaaatacggcgccaccagttttggccaactggcgcaaaagtgattgttgcgacatcaacgggagttgactcgatggttttattgacgcttttgcaacgcctaccgacagcgcttaaacctcaattgattgtcgcccacgtcaaccatgagttacggacggaaagtgtagcagaagaagcgtatctacgacaattctgtctggaaaatgacttatcactgcaagtggcgcattggccgctacaacaacacccgcaaacgggtattgaggcggcagctcgagagtttagatatcaattttttgaacacttaatgaccgctgaaaaggttgattatctcgtgacggcgcaccatggggatgatcagttggaaacactgatgatgaagtttattcgcagtggtgaactgcacgaaatgcgcgggattcaaagtcaacggccatttgctgacggcacgttgattagacccttattgccatttgctaagcaggatttacgcgactttgcgttagccaataacattacgtcctttgaagatcagacaaactatgagacgactgtcttgcggaatcgggtgcgccatactttggtcccttttttaaaacaagaaaatggccaaatcttgcaaaatgcgaatcgcttcagtcagcaattgacagccttattggggcaacaagtgcaattgacgacgacattattaccattactagatttgaaggttacagacaaagttattagtggacagctcaaggcgattaaaacactacctacagcgcaacaaacagccatctggcaactcatcatcaaacagcatttcccccaaattagtccgctaaaggaaacccaactgcaacaactcaagcaattgattcaatcaacggttaaaccacaaggtcagttggcccttggtcagaggattttgtttaccaaaatctatgatcgcttccaaattggtgaaacaactattggtgagatagccgcgaaagacgaaaaaagtcgaacgctaatgctgaataagtggtgtgtcttgccaaataacgaacaaattggtatttttgagattaatcatttgccccgtaaactatcgggccaacaattaatttggttagcagatgagcaatggccaattgttgccaaaccatgccagttaactgatacaattatgattgataaaacccaccataaaacacttaaacgtctttttatcgatttgaaggtacctcatgaaaaacggcagaatagctggggtatctgggcacaagaaaccctggttggccacccagaatttcgaatttcagcattgtttaatcacgaacaaactggtaaaatacggtacgtactgtgttatataagtgaataaagaacattcaggttttactaaaaaatggaggctagctcaatgttagaacaagatatcgaacgtattttatacacaagagaagacatacaacgcgtcaatgaaaaattgggcaagcaaattacggcggattatgaaggcaaaaatccgttgatgattgggattttaaaaggtgccattgttttcatgactgatttaattcgggaaattgatttgcatgtcgaaatcgattttatggacgtttcaagttacggtgaaggcacgatttcatctggcgaagtgaaaatcatcaaggatcttgataccagcgtacaaggtcgcgatattattatcgttgaagatattgtcgatactggtcggacgttgaattacttgatgtcaatcctcaagacgcgccaagctaattcgattaaagtttgcactttaatggacaaaccaagtcgtagagttgtcccagttcattcggattatgttggcatggaagtgccaaatgaattcgttgttggatacggtttagattatgccgaacgttaccgtaatatgggaacaattggcgttttgaaaccggaaatatattcgggtaaataaatggtcaatgaaagtcagatatgttatagtttaacagtgtcaaaaggacacagtgtcacaaatgatgagaagcttcaggaggtcacgtatgaacaacaagaagaatagactgttcagtaatagtctgttttacattattatcctagtggctttagtcggtgtattttcattcttcatgaatggcaatagcggatcagagtctaaggaagttcaatcaagtacttttttaagtgaattgaagacggataaagttaagtcgttctcaatccaaccgacaaatggtatttataaaatttcaggggaatatcgtaaagcacaaaaagacgaacagcctaagtcaacattttttggttcacaatcaaaaaataagaaagtgacacactttacaaccactttattacaaagtgattcacaagttagtgccattacgaatttagctaaccaaaacaaaacaaagattgaaacaatgcaagaaccacaatctggttggtgggttagcatcttaagcctaatcttgccactaattattatgttcggtttattctacatgatgatgggtcaagcaggtcaaggcggtggccaaggtggccgaatgatgaactttggcaagtccaaagcgcaaaaagcggataagggtgcgaataaagtacgcttctctgacgttgctggcgctgaagaggaaaaacaagaattggtcgaagttgtcgaattcttgaaagatcctcgtaagtttgcggcattaggcgcacggattccagccggggtattactcgaaggacctccaggtactggtaaaacattattagcgaaagcagttgctggtgaagcgggcgtaccgttcttctcaatctccggttctgatttcgttgaaatgtttgtcggtgttggtgctagccgtgttcgtgatttattcgaacaagctaagaaatcagcgccatcaatcatctttattgatgaaattgatgctgttggacgtcaacgtggtgccggtatgggtggcggccatgatgaacgtgaacaaacattaaaccaaatgttagttgaaatggatggtttctcaggtaacgaaggcgtcatcgtcatcgctgctactaaccgttcagatgtcttagatccagccctcttacgtccaggtcgttttgaccggaagatccttgtgggtcgtccagacgttaagggtcgtgaagccatcttaaaagtccatgcgaagaataaaccattagcagacgacgtcgatttaaaagaaatcgcccaacaaacaccaggttttgttggtgctgatcttgaaaacttattaaacgaagcggcccttgtggcagctcgtcgtagtaagaaagatatcgatgcttctgatgttgatgaagccgaagatcgggtaattgccggtcctgctaaacgggatcgggtcatcaatcctaaagaacgtgaaacagtggcttatcacgaagctggtcatgcaattatcggcttagtattaagtgattcacgtgtcgttcggaaggtcacgattgtgcctcgtggtcgtgctggcggatatgccatcatgttacctaagacggatcaattcttgatgagtaagaaagaattaacggaacaaatgactggtttaatgggtggtcggacagctgaagaaatcatcttcaactctcaatcaaccggtgcttcaaatgatttcgaacaagcaacagatattgcacgtggcatggttacccattacgggatgactgaaaaactaggaacagttgcgcttgaaaaagaaggccaaccattcgtcggtgctgcttacggtcaaggcccagccttttctgaagcaacggctgctgcaattgatagcgaagttcgtcgcttaatcgacgaagcacatcaacaagcaactgaaattattcaagcacatcgtgaacaacacaagttgattgctgaaatgttattgaagtacgaaacattgaacgaaaaagaaatcttaagcttattcaatgatggtaagatgcctgaaaagaatgctgaagaattcccaagtgaaaaagcggctacttttgaagaagctaaaaaagcacttgaagctaaagaagctgaaaaaactgactcagaattagaggctgaacaagctgattcagaaacaacagaagttgcggatgatactgctgattcaaaaccaactaatgatgactcaaacgataatgcataatcggttataacgaaaaggtcgacacgattagtggtcgacctttttgtatcaataaataaaagaggtagcataatgaaggattatttagtcaaacaagtatcagaagatggtcaattacgggcctatgccgtaaacgccacacaagttgtcacagaagcacaagaaaaacacgatacatggcccacatcatcagccgcttttggccggacaattgttgggacattactattaagtgccgctggtttaaaaggcgatactaagatgactgttaaagtcgaaggtgatggtcctgtcggaaaaatcgtagtagacggtaacgcacaagggactgttaagggctacgtcacgaatccacacgttaacttaccctcaaatgagaaaaataagattgatgttaaagccggtgtcggcacaactgggacgttaagtgtcactaaggatcttggccttaaggaaccctttactgggcaagtaccattggtttctggtgaattaggtgaagactttacgtactacttagcaaaatcagaacaaacaccatcagcagttggtgtgtcagtatttgtaaacgaagacagcacaatcggcgttgccggtggctttatgattcaaatcttacccggagcagatgatcgcttgattgatattctagaagcgcgtcttcaagaaatgccacttgtgtcagaactattgcaacaggggatgacaccagaagaaatcatcaccgaaattgttggcgaattaccaatgaagaccttggaagaattacctgttaaatacgaatgtgattgttctaaggaacggtttgctaaagcgctcagctcaattgcacctcaagatttaaaacaattaattgaagaagatcacggtgccgaagcaacatgtcggttctgtggcaaacaatatcaatttagtgaagcggatttgaaagccatcttagcagaacaataggacggaatttttgcctgaaagataattttttgctatgatagcttggatattgtcgaaagacacgaagggaatgggttggcattatgacatggcaaataggagacgtgacgattccaaatcaagtagtcgtcgcaccaatggctggtattacaaacgcagcatttcgagtgactgcaaaggaatttggcgcaggcttagtcgtctgtgaaatgattagtgaccgcgggattatgcacaataatcaaaaaacaatgggcatgatgtttgttgatccaaacgaacatccagtgagtatccaaatttttggtggctcaaaagatacattagtggaagccgctaaatttgtggatcaacacacacaagctgacatcatcgacatcaacatgggctgtcccgtgaataaagtcgtaaaaacagacgctggtgcgcgttggttattagatccaaacaaggtttacgaaatggtttcatatgtgacggacgctgttaaaaaaccggtcacggttaaaatgcggactggttgggatgaagatcacatccttgctgttcaaaacgcccttgctgcagaacgcgctggtgcatcagcacttgccatgcacggtcggactcgtaaacaaatgtataccggtaaagcagactgggatatcttgaagcaggtcaaagctgaattgaagattccatttatgggtaacggggatgtccgcacaccacaagatgccaaacgcatgttggatgaagttggtgctgacgccgtcatgattggccgcgctgctttagggaacccttggattttacgtcaagttgaaacctatttgcgcagcggtgaattgattgcagaaccaacaccaagagaaaaaatcgcaacagctaagctccagttgcatcgtttagtagaactaaagggcgaaaacgttgcttgtcgtgaatttagacaacaagctgcttactacctcaaggggattcctcgcgctgctaagacgaaggctgcagttaatgaagttgaaacagaacaagcggttggcgacattttagaccgttttgttgaagaaactgaagcaagaatggcataaggggatacttaattgcctagtttcatgttaaaatcaacaagagtagataattgaaagtaatggaggaattgtcagttggcacaaaaagataatcaaaaagaaatgaatgaccaacttaaggtccgtcgcgaaaaaatgcaatttttaaaggatgaaggcattgatccttttgggagccgttttgaacggacgcatttagcagcagcgctacacgaagaatttgaagcaattgaaaaagacgacttggatgttaaaaaccaagaagtaacaattgcaggacgaatgatgtctaaacggggtaaaggtaaagttggttttgccgatatccgcgatcgttcaggtaagattcaaatttatgttcgtaaagacgaagtcggtgaagataactacaaaattttcaagaaagccgatttaggggatcatttaggtattacaggtcaaatcatgaaaactgatatgggtgagttaacggttaaagcaactcatctaacattcttgtcaaaggcattacgcccattacctgataagtatcacggtttaacgaatgtcgaacaaatttatcgtcaacgttatttagatttgattgctaatcctgaaagtatggatcgtttcacaaaacggagcaagattatttctgccgttcgtgaatatttagatacacatgactttactgaagttgaaacacctgtcttgcatggtcaagctggtggggcctcagcacggccatttattacacatcacaatgcattagacattaacctctacttacggattgcgcttgaattgcatttgaagcgactaatcgttggtgggatggaacgtgtctatgaaattggtcgtgtattccggaatgaagggattgataccaaacataaccctgaattcacgatgttagaaacatacgctgcatactttgattacaaagatgtcatggatgaaacagaaggtatcatccgttttgcagctcacaaagtcttgggaactggtcaaatttcatatcaaggtcaagcaattgacttagatggtgattttgcccgtgttcacatggtagatgctattaaggctgaaacgggtgtcgatttctggcaaccaatgacagttgaagctgctcgtgaattagcagaccaacaccacgttaagtatgaagaatactggcaagtgggtcacatcattaacgccttctttgaagaattcgttgaagatacgttagtacaaccaacattcatttacggccatccagtggaaatttcaccattggctaagaagaatgccgaagacgatcgttttacagaccgttgggaactcttcatgcatggtaacgaatatgcaaatgcctttactgaattgaatgatccaatcgatcaacgtgaacgttttgaagcacaagctaaggaacgtgaaaatggtaatgatgaagctgaaggtatcgacgaagattatgtcgaagcattagaatacggaatgccgcctacaggtggacttggtatcgggattgatcgtcttgttatgttgttaactgacgctgcttctatccgtgatgtcctcttattcccaacaatgcgtccagataagcaagaaaatgaagaaatttaaaattttttaaacgcctgaaaaggcgttttttttgtgcaattttcgggataaccgccatataaagactgcttttggataattgttcatgttttgcataaaataccggataaattggattatttaggtgttgaaagttctgaaataaagatgaataaataaagttgacgaatgattagatagctgatatagtagtctatgttgtcagcgagataaaagccacaacgattacgagaaacattaaaaattgcttttgaatatttattcaaaaaatattaataaagttcttgacaatcagttgttataaatgggtactaacttgtcaagaactttttttaaatattttttgaataaatattcaaaacttttaaattcgatgacgtcgtttttgatgattatcaattgcctcgctgacaacatagactactataccaacattccaatatatcgtcaagcatttatttacatttttttgaataaaaatgtaaaaagttataaaaacggacatttttgaatagatatgcagtgattgtccgaattaatttaggtgtggaacgcctgttacttccagtttatcaagcaattccgtgatttcactaggatttgcgaactgatagcccgattctgcaattatttgcaattgttcgtcatagaattcggccggatgttcactccattgaaagacaaaaaacgaaacattctcaccttcaaggttaatattagctaaattaatcaatcttagctcattaacatcaattttaatcgtcgctttaatggcatttaaaactgcagctaatggtgtttgatccgaatttttatgtgttgataacattttataatccgtatcggcttgtttttgcactaaaaaatcatattgaccttgctttgtcttgtacatgattgttcctgctactttagcactcatctatttacccctttggtttaattcttcaattgccgctttagtccatcccggtaatcgctccgcaatcggtgcaaaacctgtttgaatccgacggttagtccagtaatgcttctttgctcgttgtggtagtagatcctgtgccttatgaagtgcacgtaatgacaaactaatcttatgcgtgtattcatcaacatctaacactaatacctctaattgctgtcctactgtaaattgctcgtctagcgccttcacaaaaccatgaccgcactctgagatatgaatcaagccttgaactgattcatctaatgccacaaagacaccatacggttgaattcctgttacggtgcctgtcactttttgtccaattcgataaaccatattgtcctccaactttaattatcctatctattctaatccttgtccttggtaaaaggcaagccatctgaaacaacctaccctatctttataaaaaaccaataaaaaatacccagtttacgaatcaactgggtatcacgattatcatttttagtgtttgattgaaatgtgattgataaccactggatcaacaggtttgtcttgcatccctgtttcaacagcattaatttcattaacaacgtccataccacttaaaacttggccaaagacagtatgtttgtgatctaaccaaggtgtaccacctttttcgtaagctgcaatcacttcttcaggatagccagcaccaggcatttgagacatcatgcttgggttgatatgttcattagtcacgataaagaattggctaccatttgtattaggaccagcattagccatcgataaagcaccatttaagttgaaaagttcttggctaaattcatcaccaaaagcttggccccataaactttcgccacccatacctgtacctgtaggatcgccaccttgaatcatgaagtcgttaattactcgatggaagacgataccgtcatagtaatctttttcagctaagccgatgaagttttcaaccgtcttaggcgcttgttctgggaatagcgcaacagtgaattcaccatggttggtgtcaaaagttgctgttggtcctgcaaagttttctaaatctaattgtggaaatgtcatgatagacctcctaaatgtttttaattcacagtatataatagcgaattaatctagaaattactattattatttctttttaacatgctttcctaatttttttctagtatactatttcagaagtctactatagaaggaagttatcctatgcttgatcctaaccatctttttgatattaccgtaatcggtggcggtcccgttggcatgtttgctgcttactacgcaggcatgcgtaaagccgatgtgcaaatcatcgagagcctccctgaactaggcggccaagtcgcaacgctctatcctgaaaaagaaatcttcgatgtggccggttttaaaggcattactggtgctcagctcactgctaacttggctgaacaattagccgtctttgaaccgacaacccaattagaaacatctgttaaggccatcctaccccaagaagacgggacttacatcttagaaacatctaaaggaacgacgcatacacgcggtgtgattgttgccgtcggaaatggtgcctttacgccccgaaaactagccgttgattatcaacctgaatgggaaaataactatatccactacttcgctaaagaaatggcacagtttaaagatcaaaccgtagccgttgctggtggtggcgattctgcgattgattgggccctcatgctcgaaaaagtcgccaaacaagtctatatcatccaccgtcgtgatcagttccggggtctggaaagcagtgtcgatgctttgatgaactcttctattcaaattaagacaccatttttaattgacggtctcacagaagttgatcatcaactcgccctttcactcaataaaatgaaatcaaccgatcaagaacaactggttgtcgataaattactcgtcaactacggttttatctccgatacacggattctccgtgattggggcttaacgcttgatcaccaccaagtcagtgttaaccaacaaatggcaaccaacttaccaaacgtctatgcgattggcgatattgccacttatcctggtaaggtgaagttaattgcgagcggctttggtgaagcaccggttgccgtgaccgaacttttaaccaaactctaccctgaaaagcgccaaccacttcacagtacttctattatgtaatttaaaagcgcaccgtctgatctcaaacgagaatcaggcggtgcgcttttttaattatgatttagcttttcggctctttaattggctcttaaccgcggtgatgaccattggaattaatgaaacggcaataatgcctaaaacgaccaatgagaaatgttccttcacgactgcgatgtttccgaagaagtagccggccccacaacaaaggactacccacaagacactcccgataacatcataacggaagaacttgccaaatgacatttgactaccaccggcgacaaatgggacgaaggttctgataattggcatgaaacggccaatggtaatcgtcttgccaccatacttgttaaagaagacctgggcctcttcaatcttttcggtattgataaacttcccgaagaaacggctcttggttgcagccatcccaactcttttaccaatttgttcgtttaaagaatcccccgcaattgcggcaactaagaataatgcggcaaatacccagatattcaaatcattatctgttcgagccgctaaagcagctgcggcaaataataatgaatcccccggtagaaacggtaagatgactgccccggtttctacaaaaataatcgcaaacaagatcacatacgtccaattgccaaactgattgacaatattgaccagatgcgcgtcgatatgtaacacaaaatcaattaactgcgtcatgttgatactcctatattttcatttgtcggtactcacttttctagcataccgaatattaatcctaaaacaatcatcattagagcttcttaataaattttcaatgacttctttgcccgccacaaaataatcagaaaaagaccttcgaggatgacaaaaaagcagataaagcacagcataaaatactgctcgggtaacactaaaataatgggatctaacagcgggtcaaactgccagtcgaggttgcgaaatagcaattcatgaaataacacgaaaaagcgatcaaagctaacactggcaatcaacccaattacaatcggcataaccagtgcgacttgcatcggtcgaatatagcgccattgcctccccgacttaaaatcacgccgccagcctctaagtgccggcacaatcgtcaccaggaaaatgaccgccgttaataagaagaggtgtttaacttccttaaaatgcgccaagccatttgctgacatcttgaaatgtggcaacactagcgattgtccacccggcaaaaccaaataacgcatcaagcggttaaactcgtgcattaacgtcgcctggctcatctgcatttgcgctgccaaatgaagttgtcggcttaccaagtcatagctcaaccaaccgataacaatcgccgctagaatactcccactaacgatactgagataaaaaactagccagttgcccgtttttttgacgccgtttaaacttcccattcagctaaactattgataatatgcgttggttgcgccgtgacttttgccaaatcagccggtgttgaaacgcccgtataaactaataaggttgccatttcagcatttaaacccgctttgatgtctgtattatagttatcgccgaccattaccacttggtccttagttaacccgaattgttcgagtgccatttccataataattttttctggtttaccgatataaagcgctgattgttgtgttgcgcgttcaactaaggcaatcactgaacctgcaccaggcactaagccacgttcattaggtaagttggtatcggcattcgtcccaataaaaagagcgccgcgtttaatcgcgagcgttgccaattcaaatttgtggtaagtgacatcgtagtctaagccaaccaccacgtagtctggatcatattcgttagttctaaaaccagcatctaataaagcttgtttcaaaccaatttcgccgatgacatacactgtcttgccatttgcttgaccgccatttaggtttaacaaataacgcgccgttgccaatgatggggtgtaaacttggtcttcggttgcatgaatatcatggttatctgctaaatttttgatcaccgctgcgggtgatttagtggtgttattcgttaaaaacataaaagggatgttcttagcttggagccgttcaataaaatcacgtgcttctggcatctgttcgctaccgcgataaactgtcccgtctaaatcgattaagtagcctgcgtagtttgtttttgtcatttagttactcactttccagtttcctttggggaattactctctaatggtcgaatcttaaagtggcgcttattaacggattttttattctccgtgaccgctttttgcggctgttctttagtcactttttgattaggtgttactttacgttccgtgaagccttgcttttgccggcgttgtttctgtggtcctcgccggcgattactacggcgattttcgttgcgaatctgtggtttaccttgtcgttctaagacaaaataggcacaaccaaaattacaatattcatataggtagtcttggagtgtatcaattaattgatccttattggcccgtcgattagttgatttgtagaatcccttaaggcgtagttgttcaaaaccccagtccgccacaatataatcgtacttcgcaagaacctcgttatagcgttcgtttagcttttcagcatcaaaaccatcgcgataattggcgaccacttcgtaggcacacttatcgatgtcaatcatggtttcactcttaacaacgacgtgctgtggtacttccggttgtttagccgctgcaatcatttctttttcaagcgcccgagttaccttcttagcaatcttcggttttgtttttgtatccgccacggcgaacctcctcttcccttaaacgggatatttttgtgttaaataggtagcaactgcatttctcagaaaatcagggaacataatttcagtctccccgacaatttcaatggttgggaaaaacggaataaagagataatgatcaactgtcgtcaacgtatagctagcttcaggatcaatctcctgaccatgccaaaagacgcggcgtaatgtcatatccactgtaatcccatcataaacgatgtctccaaagattttaccacggaaactcatccctttaatcgggaacttacgtaagaataaccgatttttttccatttctaagactaaccgccataaatcgtagccctttaaagtgactttaatcaaatgcatcggatgcggtaattgactctgcaggtcatctttggtgaccaaacctgcttcgagcccgcctaaaaataggccggtgttcaaaacagcggcttctgtttgcgttgccgcttcaatcgcttttaacccggccgtcatcatcggtgactctccaatggtagcaatcggcagtgcttctggcaagtcggccaccacttgggctgctaattgggcatgcccttgtgctaaataacccgcaatttcagcctcatccgccgcttcttctggtaaatcggccgtcaagacagtgcgggctttccggtcaaccgggcgatggttagcatcgagtgttaacgtgatatcgccaatataatgaccgtacttttcggcagccgttaataatgtttgattcaccatcagcccatcttttaagagatgatgtgtgtgggcgccgcagataacgtcgatttcaggatagtgttctgccaaccattgatctgttgttaagcccagatgtgatagtaatactaagacatcgtactgcccttcaatttgcgccagtaattgtggcatttcttcactaattgtgacaggatcccaaccattaggtcgatatgtcaaaaagaatggcgccgttaatccgacaaccgcaatccgcgtcccttgatcagttgtgataatgcggtacggttgcgcaaatttagcgagggtgtttgtggattgttcatagagatttgctaacaatacggggaaattcgcatgatcgtatagatgttccaactgtgcatgactattgccaatgccttcattattaccaattgtcacaccatcataaccaatttgattcaacagggtcgtattaatctggccgtctgttgcttcagttaaagggtgactacgatccattgcatccccgatatcaaacgttaagaccgtttcacctttttgccgataggccgcttggtgggctaacaagaagcggcgcattcgaggccaattttcaaaatgcgagtgtaagtcgttcgtgtgtaagatgtgaatagtttccattttgtcatcctcttattttaattgcgttaacgccttttgttttgccgtcaagattgcttcaatctccgctactgataaaggtgtcccaaatggtagtggtgttttcaataattcacgttctggggcgtcaatccccacgttgatattctcagcaattggtagcatgttgtggtgaatgtggccatgcaagttaaccgtttggctaactttaccgagtaacagcggataatgggttaagaaatactgccggtgattaatcttaattagcgccccgacatcgacaaattgatagtgcgggtgtgcctctgttcccggatcgtgcttcttcaaatatttaaagaaggcacggttgtcatgattgcccttcaccagaataatctgaccattcaatgcgccgagcaaagcattaacttgcgcaaaagcagttggtttattcgggactaatgcaacgtctcctaataggtaaacctgatcctccgattgaacacgctgattccagttagtcacaatcgtctcattcatggtggccacatccgcaaacggtcgtggcgcaaagtcattcatcccgagtaattcttcatgatagaaatgggtatccgctgtaaaataaatcattttatcaaccacctagccaatatgatttgcttttaaaacttctttaaaagcctcttcgacaggccccggtgttttctcccattcttcccattctgtaaaatcaacagcgggcatcgtataagtattattaatatagtcttcgtaagtttgaacggcattagaatgtggaatgtttaattgcaaaatccgcacacccttaattaacccgcgattagcggcgagttctgcccgcccattcataaaaatattgcctaactcatagtacgttgaaccgtctaagcgtgtaatttcttcaataatatcaaacacttgttgtttctctgccatagtgtgactccctattcttatccgatttcagttacgttcattttaccaatatgtacgcaaaaaaaccactatccgtagacagtggttggcataagagagaaagagaattgataaaaaggtaattgcataagtaccttacagacataatataccgctcaatgtaagcgttgtcaattattatttagtaataattcgattaatttataactgggttctaacacgatgataggttttttagaaaaataatggtatcttaattagtagttttaaatttaattaggaggccgttaactttgttaaagtccaaatcacaactgggcatcgtgctcttttgctgcttttactttctcttattatctggctttacagttgttggtcatcgcggtgatcccattaatgccccggaagaaacattccagagtattgatatggccttttcgcaaggtgccaactacgtcgaactcgatttacatgagtctcaagatggcgtcttagtcatctcgcacgatcgtaatctaaaacgtgtcaccggtgtcgacaccattgtttctcaaaacacgtttgccaaattaagcacactaaaaatgagtaatggtgaacctgtccatagcgttgaacagttattccaacactatcagaacaaccccaatgcgaaattcttaattgaaaccaagaaaacaaaaaagggtaacccgcaggacatggaagccaaattagttgcgctcattcaaaagtatcacctgcaaaagcggatcatggtccattccttctcgttaccaagtttaatcaatatgcaaaaactaatgcctgagattccccgcatttttatcgtgggtagtctcaagcggatttcatttgaaagcttcaaatatgcggacggaattaacatttcttccgaattagtgacgccgacgattatcaaacaattgcattacctccaccaaaaagtctacgtctggaatgaaatggccgaaaatcaagccacttggaactggctcgttaacctcgatgtggatggcgtcgtcactaattatcccgcgctaggccgacattaccaagccgcccaagatcaatcccagattgaatccttagaaacgactggtcaggtcaatagcgttcacgatttaaccaccgttgaaaacccctacgaacaagtgcccactaaagcaccggctaaggctggtcatagctacgacgtaacccaaaccgtcacggttgccgatcagacctattatcgaattggcactaaccggtttgtattaagcgatgcgattaatgttggccaaaccgcccaagcagcttccttattggtaggcaaaacagcccagatcaaacccaatccgatgactgttgcgacttggaatagtcccttgcatccgacccagacaaccggtcagctgctagctaatagtcgccacaaaatattagccgttcgctatgttggcaatcaggtttggctccaaaccgcaaccggctggttcaaaagtcgccaagcattgattcaattggatcctaatactgatttaccaaccattgcattagcttattaccggcaattgccaaaacaactccgccccacaaacctactattaaaacattccttttttaacactaaattctaacaaggcaggctattatgacaatcgaccacgatcaactgattcgctccgttcaaaaaacacttccgaaagaagacacgctcgatcatatctcaacactttttaaaattcttggcgataagacccgcgctaaaattctgtacgcactcttccaatcagaattacgggtttacgatatcgtcagcgttttagagatgtcacaatcttcaatctcacatcaactacgggtactcaaacaagcaaagctcgttaagagtcgcaaagaaggcaaagaagtttactactcccttgctgacaaccatgtgattaacatcttctcacaagtcatcgcgcacgttaacgagcactaattattacaagaggctgcagcaaattaacttttgctgcagcctctttttctctaaacgactacaaactaaacgggttgcattttataggttgtggtgttatcttataggtaacatatgaatatatgctcatatgtatatctaattcgtaaatataacgatttagatccgaattgacggttcattaaccaataaggaggactcatcaatgacacaaattcaattagcaggtatcgattgtgccgcctgcgctaccaaaatcgaaacaaacgtcaaaaaattaccgcaagtccaagattgcgcggttaactttgcgacgcaaaaactgagttatgaattaaccggtgatcaagccgccaccgcgtttgaattagagcttcaacaattgttaacgacaattgaaccagatgtcaccattcaaaaatcattaccggctgcgggccaaacaccccctaagaaatttaaatttaatctagacttggttcgaattatcattagcggccttttactattaggaagctacgtcttaccacttagtcagccgctactaatcagcttgttgctagtcgcttttgtcctcatcggttacgatattatctggacagccatccggaatattcttcacggccaatggtttgacgaaaacttcctaatgaccgttgccaccattggggcctttgggattggcgaatacgctgaagcagttggcgtaatgctgttctatcaagtcggtgaatatttccaaagtttagcaatcaatcgctcacgggattcaatcgctagtttggttgcgattaaaccgacttttgccaacctccaaactagccaaggcctccaacaagttgcgcctgaagccgttcaagttggtgcaaccattttaattaagcctggtgaaaaagtaccactagatgggaccgtcatcgcgggcagtagttttgtcgataccgctgcggtcaccggtgaatcggtgcctcgttcatttaacgttggcgataccctcttgagtggcagcattaatcaatccggtcttttgacccttcaagtcacaaaaccttacgctgactcgacggtcgctaagattttagacctggttgaaaatgctagcagccaaaaagcgccgactgaaaacttcatcactcgctttgcgaaagtctataccccaatcgtggtaggctttgccgtattattagcagttgtaccaccactctttttaggacaacccttctcagattggctctaccgggcactcatcttcttagtgatttcttgtccatgtgcgttagtcatttcaattccgctcggcttttttgccggtattgggactgcttctaaaaacggcatcctggtcaaagggagcaattacctcgaagctttaaacgatgtgcggacagttgttttcgataaaacaggaacgttaacccaaggtagttttaccgttacagcaattcacgctgtcgatcatcaaccgaaacatttactcgcattagccgctttagcagaacaacactcaacacatccgattgcacaatccatcattgctgctaatcaagcaccactcaatcaaacactcagtgcggtcacagaagttgctggtcacggcgttagtgcaactcttgacggccaatccctaaaagtgggtaaagctagctggctcaaggaacaagggttaacaccactcacacctactgaagtcggtactgcggtgcacatcgcttatggcactgattatcttggttacctcgttatttcagatcagcttaaaaaagatgctgccacagcaattgcgcaactgaaaaaagtcggcatccgccaaacgatgatgctaactggtgataacgacgcaatcgctaaacaagtcagccaatcattgggaattgatcattatcaaagtgaactacttcctcaagacaaagtggctactttagccagcctgactgataaccgtgcgcaaaacggcaaggtggccttcgttggtgacgggattaatgatacccccgttcttgctcgagccgatgtcggtgttgcgatgggcggtttaggttccgacgctgcgattgaagcagccgacatcgttttgatgtccgatgaaccaactaagttagcaactgccatcgatattgcccgtttcacccgcaaaatcgtctggcaaaacattgcttttgcgctcatcgttaaagcaatcttcttattactaggtgcatttggcattgcaaccatgtgggaagccgtttttgcagacgttggcgtaaccctaattgccattttaaatgccttgcgtattatgagaaaatcgaactaattcatatttgagattagtttcacataatagatacattaataaaagaacgaccgttaaaagtaattgttaacagccgttcttttttagtaggaagcgctttttaattgtgagcaaatatgctagaatgaggttatcctaattttagattaaccgcaccttggttaaaatttaacaaagaaagctgggactgcaatgacattgaattggcaacaagaagcggcaaagtataaggatcaaatgcttaccgacttaacaagtttactcaagattaatagcgcgcgtgacgttgaacataaagaagacgatgcaccgcttggccctggccctcgtgatgctttgctacaaatgttagcaattgctgatcgtgacggttttacaactaaaaacatcgaaaacgttgctggccggattgaatttggtagtggcgacgaaatttttggtattttaggtcacgttgacgtggttcctgccggtgacggttgggaaacaaatccttttgaaccagttatcaaagacggcaagatttatgcccgtggttcatcagatgacaaaggcccatcaattgcagcatactatgcgcttaaattattaaaagacaacgatattaaattaaacaaaaaagtccacttcattttcgggactgacgaagaaagtgaatgggttggtatcaaccgttatctagaagttgaaccaaaacctgattttgctatctctccagatgctaacttcccaatcatcaatggtgaaaaaggaattgtgtcatacatgatcactttcaaaccagttgatggcgctgatggtgaaatgacattagtaagcttcaagtctggtttacgtgctaacatggttcctcaaactgctaaggcaatcttaactggtgcaatgccagctgatttccaagctaaatttgatgcttatgtagctgaacacaaactacaaggtactatcacaactgatggtgaccaaacagtaatcgatttaatcggtaaaggctcacatgcccaagaacctaaagctggcgtaaatgctgcaactcacttggcaacattcttagctgactttgcattagatgctaaaggtggcaactacatcggtacaatcgctcgtttaatgcacgaagactcacgtggtcacctcttaaacatcaaccatacagacgatgtgatgggtgatttaacagcttgccctgctgtcttcaactacacacaagacggtgttgcatctgttctcttgaacgttcgctaccctaaaggtgtaactgatgaaagtacacgcgaaggccttgctaagacacttagtgatgttgccgacgtaacaatcgaaggccatgcacaagcacctcactatgttcctggtgatgacgaattagtagcaactttattacaagtctttggagatcaaacaggtcttaaaggtcacgaacaagttatcggtggtggcacatacggtcgaatcttagaacgtggtgttgctttcggtgctttaccagaagaacgcgaaaatgttatgcatcaagcaaatgaatacatgcatatcgaagatatcatgaacgcaattgccatctatgcagacgcaatttatcgtttaacacgttaaaactaacttaattgtactaaaaagagacgaccaacattggtcgtctctttttttatactgttattcattagcaaattccataatggccggtaataattcgtctaatggaacttcctgcaagacacattgaccatcgactagcaaatcatagcgcgtttctgccgccgtcttcatttgagcagcataaatctgttgtgccgcgctcaatgcctcttccgattgactatcttcaagcgctaaatcaacattaacaacgtcttctagtactaaaaattggcgcgtggcttttcgaacctgccaagctgattgcttcaaaatacgacgcaacgtgttagtcaattgttgattaaatgccagcatgagggctgctgccggtgctggttggccaaagtcctccggcataatagccttaccataacgcattaaatcacgaggcgaccaccgccaatattcactaatcgtttgcgttgtatctactgagcacagtgccacctttttaatatcggttaaggtttcaattggcacttcagccgagcaagccaatcgatcatacataaagtaatcctcccccgctttaaatgacgcttttggatccgttaaaaaagcggcttgaatctgttcgagtggtaactgttgccccacacaaaataaaatcgtgccaaggatatccaacgtcaaacggtcaaagacgacttgccccgctgcatcccgaattttaaaatacagttcatcatcccgcccgaactgttgacttgattctttattgaaaaccggtattttcaactgatcgtcgtaacacaacaaactacgataatccgttttaatattcagcaagtcgttgattggctcaaaagtgggttggtgcgtctcttgctgatggttgataagtgccgtgaggagcgccggttcgacgaccggataagattctatgtgacttagatgatagcccactaccgtataccccaattgtttaacctgctcgatcaacattaaaattccagcaacatgtggttgttcaaaatcgagcacctccgtaggcagtgcatttaactgttgttcaaattgatcttggggcacatcaaaaagataatactgaccgctgttatcgaaaaggcgataccgtggttgccgcgtgacaaaagtcggcgttgtcgtcgtcagacatgttgctccctgttcatcaaccaattcaggttggctataagcataatacactcgctgaacacctaattcctgatgatccaaatcaaattgatattgcttagcgtcttcatgtccctgatgttgcttcgcaaacatctcaggatacatttgtttgagtttatgccgtctaatcgccgtataagccacaccattttcttcaaggatcgttttaaattcccgttcagttggatagctgccgttaaaatctgcgacaaagccgacgaggttcaaataaaattcaaagccgtacccttcgttgataaactgcaaatattgtcgtttttccatcagtaatcagcccctatgtttaaattaataacgttattataaacaacggacccgacacattaagtcgtttcaagcgatgcgtactgaatttttagacaataaaaaagtgattgttaggacccaattacccgagtcctagcaatcactttttgccatttattctttagtcggtgcatccactaatttaaaggttgaatgcccttctttgacaatcgcatataaaatttgttgttttgtatcatcgaaatacccgagattcacagccatttcgccatctagttcttcaatcccttcgaaatgttcccgaataatcgatcgcacaatcttcatattagccatgtgcttttgaattttttggaccgcaacgctcaacgtgtacccttcatctaagaaatgcttgatgaaaatggccttaatcatcatttgagcgtcgtactcacgggccttattgccatctgcttcgcgggccttaatgtagcccttttgttcccagtagcggagttgacgcggcgtcacccctgccatcttacaaacttcactaatcccaaaaattaatcgatccgtatctatcaactttaaaaaaaggtctttttgcaagtccccactccgttcctattaataaatttcattatagattatctacaaaacttgtcaagtcgaatgacatctttgtcaacttacttgacaaaggctaaaaatgcgactaaactaataaatcgcatcaacaaaacgtaaaggagatttttatcttgtcagactctagaccattagatattcatgggaaaccatacaaccggacagtcttagtcttggtcttattgattggtactttttgtactgtcttaaaccagacgattttatcaactgctttccccacattaatgaaagcatttgacgtgtccacttcagccgttcaatggctcacaaccggtttcttgctagtcaacgggattatgatccccattagtgcttggttaattaaccgattcaactcaaaggtcctctacatgtcagcaatgactgtctttttacttgggaccattatttgttacatcgcaccaacgagctcatttgcaactttattaatcggccgtcttattcaagccgccggtgttgggatttcaatgcccatcttgcaaaccattatgctcacgattttcccacctgaaaaacggggcacagccatggggatggccgggatcgttatcggtcttgcacctgccttaggacctactctttcaggttggattattgattcatacaactggcgggtcttattcggaatgattattccaatcgtcctactcgtcttagtgctagcgagcttccaaatgaagagcgttatccaactttcgaaacctaaaatcgatattccttctattattttatcaaccgtcggctttggtagtttactctatggcttctctgaagttggagataaaggttggggcgacatgcttgtcctcgctaccttggcagtcggcgtcatcgtaattgccctctttgtttggcgtcaactcacaatggaaaatccattcttggaactacgcgtcttcaaatcacccgttttcacaattgccgctattttaagtggtgtgacaaacatggcgatggtcggtgccgaaatggtcttaccattatatattcaaaatattcgtggcgaatctgccttccattctggcttaaccttattagctggttccctcatgatgggaattatgatgccaattacgggtcgtatttttgataagtacggcgcaaaacgtttggccatgaccgggatgttcttattaatggctgctactgcaccatttatctttttaactgctaagacaccaatcatctacatcgtcgttttatatgccgttcggatgtttgggatttcaatggtcatgatgcctgttacaacttctgggatgaatgctttaccaatgaacttaatcagtcatgggacagcggttaataatactttccggcaagttgccagctcaatcgggacagccatcttaatcagtgtgctttcaagtgttaccaaaaacaatatgccaagcacacacatggtcaagaccttaccattggccttccgtgataaaatgattaatgcaaccctttcaggttatcacgccgcctttatcgtcgccgtgattttctgtgtgatcggcttcattatcacattcttcctctcctctaagaaatcaactactaatggaggtgccaaagcatgatcgttattacactcattattagtacacttgcgttattctttgcttcaatcttcggtcaaaaaatgtggcgcccaattttaatgaccattttcggtctcacttttatcgcgtcactctttttcatcgttcaaaatgatcacaatcattatggcatgaaaactgtgaccgaaactaagacacaaacccttgtttcaagtgccgatgctaagggcatgtcaatgttgctctatcacccacttggcaatggtaccgaaaaagtttacctttatcggactgatatccaccaaagtaaacctaaagcaacccaaactgaaaagacaaccaacagtgttcaaaagaatgctgataaggctgccttagtaaccactaccaaataccgtgtgtataaaaatgacatggctaaattctggtttggtatttctggcaatgaccacgaattcgtgagccgccacaataccttcaaagttgctaagggctggctcgttttaagcgacgctcaagctaaacaactcgctaaaacattaaagagtcaacaagcacaactcaaagcgggcgcaactaacgccggtaaacaagctgtgatggcagccatgcaagctaatccagcaatgactgcaacgcaacgacaagcagttgctaaaaatgcagcgatggcctatcaacaagccgcaatggcaaaagtgatggcaacgttgaaataatagcattacaaaaagcccccacatcttgattggatgtgggggcttattttttttggaaacgcgcttcctgtcgcagcactcttattcttaaacatgctccttcaggcatactcttccggttagttacacatcgcaaacgatcgcctttggcgctcattcacgatatgccactaatcctcagagtataaccgcctgctgtcgcactctattttgataacaagcttgctgctgcttcgtccacgatgattgtcacgtcgtcgtgtagttgtaaagcacttgctggaacgtctgttgtttgtgggccttctactgtgcctttgatggcttcagcttttgattcgccgtatgcgaataagacgatcttcttagcctttaagattgagccaatgcccattgagattgcttttgttggtacatctgcttcgttttcgaagaaacgagcgttagccttaattgttgattctgtcaattgcacttcttgtgtgttgctgtcaaaagcagcacctggttcgttaaaaccgatgtgaccattttggccgataccaagaatttggatgtctactgggttatcagcaatgacttggtcataacgttttaattcagcaggaatatcacttgccaaaccgtttggtaagtatgattttgcaaatggtttcttattaaataggttttctttcatgaagtagtggtaactttggctgttatcagctgataaaccaacatattcatccaagttaactgatgtacagtttgtgaagtctaagtcacttgcaacaactgtttcgtagaatttgattggtgaactaccagttgccaaaccgaatactttcgcgtcgtttgctaaaccttctttgaagatttcaaagcctttttggccgccttctacttgatcttttactttaataattttcatcgtgatagtctcctcataatttagaattcaaagaaccattggtatagtccaattataaagcaggcccctttcatttgcaagcattttaaatttaattctatgtctaaatattggtatacctaccagttagcgtttccactaccgtgctaattagctatcaattattgattggtctggcgatttcatatttttcatttaccttacaaatttaaatacaggtataatattcagaaaaactattatataatattggacagtatgagaaaaaaggtggcgttattatttgaaagattcaaagcagcgttccagccaacggcaaaagcacgcatcagccctcatctctaaagggcgtcgcaaagtcaatacgctattttccaagattaaaacgaaattatcacattcaatgccttggcttaacaattggtttaaacatcaagacaaagaccaaaatcgaacatttgtcgatcaatttagtgccaaacccctcacttttaagcttaatgtctttttagaagcacttaaaagtttaatcctctacggcatttcaatcggtttgattatgtttgccttaggtcttgggattggtgccggctactttgccgcattgatgaaggatgaaccggtcccaagttatcaagtgcttaaacaacaacttgataacactgatcaagcggccggcctttactttgccaagaacacaaaattcggcgcaattaagactgatctctcgcggacacccgtcagcatcaatgagatgtcgccttatctaaccgatgcgattgtcgcaactgaagatgaagacttctataaacatcaaggggtcgttccaaaggccctgttacgagctgtcatctctgatttaaccggctttggttctcaaactggtggttcgacattaacgcagcagttaatcaagatgcaagtcttaacatcccaagtaaccttcaaacgtaaagcaactgaagttttacttgctttacgcgttgacaaatacttcacgaaaaaggaaatcttacaagattacctcaatattgcaaccctaggtcgaaataataaaggccaaaacgttgctggtgtacaagaagccgctcaagggttattcggtaaagatgccaagaacttgtctttagccgaagccgcctatattgccggtcttccgcagagcccttccgtctatacaccatatgaccaagatggtaccttgaaagatcctgaatacttgaaatacggactagaacgcaagaataccgttttattccggatgtatcgtgatgaccgcattaccaaagcagaatacaaagctgccaagaaagtcgatttaacgagtgaattccaagctaaagcagaacctgaatcaacttctaagcgttatggctacgtttataaccttttggaatcacaagcaactgatatcatgacgaaacaactcgccaatgaagccaatgtttcgactgaaaagcttaatagtagcccaacgctctacaaacaatatgaaacaaaggcaactgaactcttaagtactaagggctatcaaatccatagtacaattgacaaagatatctatgattcaatgcaagaaatcgtcaaacaagaaggcagttcttttggaccaacctatcaagatgcaacgaccgatccaattactggtttgcaatcagtgggcgacacaccggttcaaaacgggagtgtcttacttgataaccagactggtaaagtcatttcatttgttgggggtcgcgacttctccctcaagcaaactaactacatgttaaccaaacgatcaccgggttcaaccattaaaccactcttggtttatggtccagcgattgatcaaaaactgatcggttctaaaacgatgttggctgactttaaaactaacttcaaaacttatgcgccaaccgattatggtaacaccatccaaaacaagttcatccctgcggataaggctttagcgcaatccctcaatatcccaaccgttaacttatacaataagttacgtaaaacgactaaccctgcgacctatatggataagatggggattcacctttctgatgatgaatatagtcaattgggacttgccttagggggaaccaaagatgggattagtgtgctcgcccaagcaagtgcctttactacatttgccgatgaaggccaacacgttgatgcttacgtgatcgataagattactgaccctgctggtaatatcatttataaacatcacactaagaaaacacgagtcttctcgaaggcgacaagttacatcatgaaccaaatgttatcaggtgtcttaacagatacggatgggaccgcaacacaattgagcgatcaactctacttcaacactaataacctggttggtaaaaccgggactaataatgataaccgggatgtttggtttatcggtagcacaccagggattacccttgcttcttggatgggttatgacagtactggtcgtaacttaaccgatagttctagcacaattaatcaaaactattgggctaagttagccaatagcgtctatcaaaatgatccaagtatcatgaaacttgaagaagatcatgaaaaaccaagtaccgttacaagtagcaaagttgttaaagcaactggtcaactgccaggtattgtttccattaatggtaatacgcgaaccgttgacagtggtaaggtcacttcgctttacaataattggacaccagaagcaacgcaatacgaattcggaattggtggcacaagcagcaattacgaaaccttctggaatcattatatgggttataataacggctacggtacaattacgtacggtgaaacaaaagctagtcaatcagaatcagaataaaaaacaagcggtgattacagattatgtaatcaccgcttgtttttgttttatttagttgattgacgatcaacaatgctatatggcaataggattgtcttatcatcgatttcttctttgttcatcatcttcgttaacagacgcatcccaacagcacccatatcatataaaggttgtgagattgatgtcatcttaggacgaaccatttcagttaacttcgtgttattgcttgtcacaatttcaaagtcagttggaatattaacccctgcatcaacagcagcatttaaaacacctacggctaattcatcgtcactgacaacagcagcagttgcgccagttgcttgaaccttaccgaataaggcttcaccagcactgtaactgtattctgtttcgaaaattaagctttcgtcataaggaataccagcttcgttcaaggcatctttatagccacgtaaacgatatttgctgttgattgggaactctaagttgccacagatgaaggcgactttttcgttaccgttcttgattaacttcaaagttgcgtccttaacggctgcaacgtagtcaatattaacactaccgacttgttcgtctggatcgattgaaccagctaacacaattggtgtcttagaacgggcgaattcagcacggattgcatctgagatactgtgacccatgtagattaaaccatccacttgttttgccaataaggtattcaatacttgaacttccttttggttgttttcatctgagttcgctaaaatgatgttgtacttgtacattgtggcaacatcatcgattccgcgtgctaatgaagcaaagtagatatcactaacgtctgggataataaccccaacagttgttgttttcttacttgccaaaccacgagcaacagcgttaggacgatagtctaaacggtcgatcacttcaagcactttcttgcgagtggcaggcttaacgttggggttcccgttaacaacccgtgagacagtcgccattgatacgtcagcttcacgcgcaacgtcgtaaattgtaattgtttgtttttccattttaaaatgattcctttcattcgcaaaataaaatatattgtattttcatttgttttcatttcacttattgattaatttaacagatatttaaggcaaatgcaagcggtttacattatttttatgaaattttcatttttgttttcatttgtagtttacattaacgtttacattttctgtgctatactgtgattatcaactgtaaaggaagtgctttagatgaataatcaattagcccaattacaaaattggcttgtcgagaataatatggatgtggcttacattagtaatccaactaacatcctctatttcactggttttgaaagtgatcctgcagaacgtgttttagccctctttgtttttgcagatcaggacccattcctatttacaccacaactagaagttgaatctgctaagaaggctggctggaaacttgatgtttatggttaccttgatcatgaagatccatatgccatcatcgcagatcaaatcaagaaacggatggccaacccaacacgttgggctcttgaaaaagacgaccttcccgttcaacgttatgaagcaattctaaagcaattccctaacgcaacattccctggtgatgcatcacgcttcatggaaaacttaaaattaatcaaaacacctgaagaaattgctttaatggaagcagccggccgcgaagctgactacgcctttgaagttggtttcaacgctttaaaagctggcaaaacagaacaagacatcgttgctgaaatcgaatatgctttaatgcgtaaaggcgttatgcatatgagtttcgatacaattgtacaatcaggcatcaacgctgctaacccacatggtggcccagaagctaatatcttaacacctgatgcattagtgctctttgatcttgggacattacacaaaggttatatgagtgatgcgacacggactgttgcttttggtaaaccagatgctaagtcacttgaaatccacaaagtttgtcttgaagcaaacttagctgcacaagatgctgttaaacccggcattacagctgctgaattagataagattgcccgcgacgtgattacgaaggccggttatggcgaatactttattcaccgtttaggtcatgggattgggacttcagaacacgaattcccatcaatcatggaaggtaacgacatgattatcaaaccaggcatgtgcttctcaatcgaaccagggatttacatcccaggtgttgccggtgtccggattgaagactgtgtccacgttacagaaacaggcgcagaatcattcacacacatgacaaaagaactacaaacattctaagagtgcgtaagcaggcgattatattttgaggactagcctagtctggtgaatgaccaacttgttggtcgtttaacggacgtagctagccgcagaaatatgcctgctgaagcacgtttcaagtaagagtgctgattcgaacgaattgactttgaggattaacttaaaaacgcggattatgacgcccttggtcatgattcgcgttttttgttaaccggaaaaggcagttcgaagaagcacgtttcaaataagagtgcccttaattgcgtctagcaactgagcattaatacaaaatgagtcataatcttggttttaagattatggctcattttagattaagcggaagttgttgcaattaatggcacgtttcagatagagtactgtgccaaacgggtaacttctacgaaaggtgttacaatcacccctccaaattaaaaagccctcacaatcagtgagggctttttaacaatcctttattcacctaatgaatctggtgccatcttttcttctgcttcatctttggcttggccaaaagcactcttgccttcaatgacgatatcatcaaaatcttcagcagctggttctaagctactaccgaattgtgattttaagtctgccgtcttttcatcaaattgcgctttagcttgttctttgatatcaagtgcattttcttgccaatcactcgcataatcgtgcacacggttcatatggaacttcgcttctcctttaagatcagcagccgtttcgttcatcaagtaataatagtcttgtgcgcgatcaatggcatcttcgcccaagtccactaatttattttgtaattctttacccgttttaggtgttaataaaagtgtggcaccaattgctgctgcgccgcccactaaaacaccgaataaaaagcctttttttgccatgtgaattactccttgtcttttgtttgtcgtctattttgatagaatctaagggcactggcccccattttagaagcaactgttgctttggcggtcgtgcgaccgacacttgttactttttcagtcaaaccacgactggcagcattcaaacttgaaacactctcgcctaattcgccggctgcacggaaaactggatctaaatctgctactttaccgttgacatcgtctagtaaaacattcgttttgttcaacagaccttcaacttgtcttgaaaggacatctacatcattcgtaattgttgtcacgctcttattggcttcggtgactgtctcggaaacacgcgttaaaaccttagtgacttttaataacatcactattagaaaaacaaccaaaactgcaaaagcccctgcagcgattaatgctgcaatttgaccacccgtcatcaatttgttcctcctatttcgtcgtctattatcttgtttctcagtctctaggatagcattattcggtacaaccttcaaataatcatactatattagatgtcatttttttaaacatttgctaaactagaattatgcacttttaaaggagtttgtcagcatgttctttcaatcactaaccaccacacccgtcgagtcggttcaaaagcaaaccaatatctttatgcgctatataaccagcatcgattgggatcacctcttaggtctcttcatcacgggcttttttcaaatcattttaatttcactacttttttacttgcttagtcgcattgggcgttttattatcaaacgggcctttcgcaaatatcgcgaagcagatggtttttccaacaatcgaatgaataccatctataccctgatgaccaacgctttggcttatctgctaattttcttttacctttatgcactgctcagcattatcggcgttccagtcgggacattaattgccggtgctgggatcttcagtttagccgttggtcttggtgcccaaggatttgtcaacgatattgtcactggctttttcatccttgccgaacaacaatttgacgttggcaataccgtccgaattggaacgattgaaggtaccgttacagcgattggcttgcgaaccacacaagtgcaaagctacgatggcacgctcaatttcatccccaaccggaatatttcaatcgtcagcaatctttcccgcaacaatatgcgggtactgattaatattcgtatcaaccctgatacggatatcgaacaactcgcaacaatcgttaagcaagtcaacactgaattagtgccgcgccatcccgaaatcaaagacggccccacattactgggggtttcaaccttaacggatggcacacttgcctaccaagtggtgatgcacacgcttaacggcgaacaagcaacgacgcaacgtttattcctacaaggttacttacaggcgattaacgccgctgggattaccttacccaccagttcattgactttaaccaactaaattatccgccaaaggagcactcttatgccactaattaatgcactcaaaggcgccctcatcggtgtcgcactcgttattcctggtttatctggtagtatctttgccgtcatcgttggtttatatgaaccattattaaaggccatcgcgcagttcaaacaagattggcgccaagcaattggctttttatggccaatcggtattggcgcgggcatcggtgttttattatcgaccaaagttattttatggttatgcaccgcttatccactggccgcttatagtttcttcatcggcctcgttttaggcagtttaccgttcatctggcgcaagcttaaaaagctaaactggcagcaagtcttaattgccattgcctgtggtggcttgatgttattgattaccaaaattggtggtcatcaaaacgaatctgacattgccatcaaacaactaacgtccctccaagatttcgggatgttaacctttaccggctttttctccgtttcattgatggtgattcccggtgtttcgggttcgattatgttgatgattatcaagcaatacgggactgtctatcacgccgttagccaattactcgatttgctcgtttatctcgttaccggccgctttgaacaggcaggcgaggctttcaaaagtgtcgccctcctcttgccatttatgctaggtgctgtgattgggaccgtgattgtcgctaaaatcatgcattacttactcgctcactatgcccaatatgtttatgctggcgttttaggcgtgatcctagcagccatctggatcctagctgaaacgggcgttgtacccgcttggccggctgttggtggtttaaccacactactaggaccaatcgcattaatcgccgtgatgctcgtcttaggagccattgcgacgatttacttcgatcgggcctaaagagtgccgtttgaaacgctttggctttgagcattagcacagctcggcgaataactgctgcaagcagttgtttgatgagtgacgctaagcacagaaggcagtttcaaaaagcacgtttcaaaaacaaagtgtgttgtcagtggttagcttttgagcatttgcagaacttagcgaattggtgatgaaatcaccggtttgataagtttagcaaagcgcagaaagctactgacaaaagcacgtttaaaaagagtgcgtttgaaacgctttggctttgagcattagcacagcttggcgaataactgctgcaagcagttgtttgacgagtgacgctaaacacagaagtcagtttcaaaaagcatattttagctatcaaaaaaagcgttacgacaaaataacttttggcgcaacgcttttttaatgcgctaaaataaactaattttgttgtttctctattggtaaagcctcaatcttatattctttttcaatattatgggctacccggttaaaactcttcatcatctcgcgccgagtcacaatccctgtgaattcgccgtcgtctgataataccggtaagtaaggatgatcaaccaataaatgaagtgtttcttcaatatcgtacggatctttaattgtcacaacatccttttgcatcacatcttgaacggtcattttacggaggttatcgaaactcaagtgatcgagtcctaacatcgtctctgtaatcagtggcatggttagcatccctttaaacttcgaatgattatcgagcaccggaatacttgaatatttaacagttgttaagagaataaacgcatgttctaacgagttattttcctgaacgctagcgaccatttcaccaggaattaaaaaatgttctttgttttcgagtaataaattctgaaacgcatctgaaatcatgcagtgtcctccttctaattacctacgtttaatattgtaccaaaccactaactaaaaagactatccacagcgtctaaactttggatagtctttaactttaagctcttttaaatttaaattggagttgtggtactttttcaaaatggcggtcataatattggacttgatagtcagtcgccgtgatatccacaacagcatatgtgccacctaagggttggaattggccccggggttgcgaaatactgcccggatttaataccaagagcccttggtgcatttcacaggctaactgatgtgtgtgcccgtaaaaagccaattgcgcgccttctgcttgagtcgctaacatcaaccgcgttaaatcaaaattaacaccgtacaaatgaccatgcgttaaaaaggccttttgcgccccaactggcaccaccacttgttctgggaagtggccattaaaatccatattaccttgcacaaccgtcatttgttgaaataatgaatcggtcgtcgttaattcggaatcaccacaatgtaagaaagtgactgcttcatccttataatgcgcaaccaattgcaccaaaatatcccgatcgccatgactatcactgactactactaaccgcatcttaattcctcctattttgccaaccaatcacgccaaagtggttctaaattttcaatcgcttttgcacgatggctaatcgcatttttctcggccatcgataattcggccattgatttatctagttctggtacgtaaaacaacggatcgtaaccaaagccgttatcgccacggggaattcctagaatccgaccgttaacactaccttcaaccactaaatcatcgtcaggccgatcaggtttcgcaaacactaacgttgtatggaaatgggctgtccgtttttcagcagggacgcccgttaattcgtataataacttggcattattgccggcatcgttatgatcacccgcaaaacgggctgaataaatgccaggacgaccatctaaggcatcgaccattaagcctgaatcatctgccaaaacggggagctgtaaaatagcagcaatctgatcagcctttaaacgagcgttttcttcaaaggtttgaccggtttcattaatttctggtaattcagggtaatccaataacgttttaatttggatcccctctttttcaaacatcgcatggaattcttgggccttgcccgggtttttagtggcaatcacaattgttggcatctcagagtgctccttttgaatgattgggtggacagcttgttgataactcgcttgaatctgttcagcagtccgtgtaccgccttggctagcgaccaataacaattcgtttaactgactgctgttaaccgccgttgcgccttgtaacgtcatcgctaaaatttgttcttgattatcggtcacgactaacaacgtgctatcagcaaccgcttcttccgtgtcactggcatccactaatgtttcgttaccggtcagaatagccgtaacggctgctgcacgattaggtaagaattgttcaggtaataattgcaaggccccaaaaacggcattgctagcttctgctagtaaactaccaccgtcttctaaaaccgtcactgacaccagtaaccccgtcttttccaaagcgggcgctaacaaagtggttagcgtctgttgtaaccagtcactttgcacttgcgtcaagccactgccaattagcgtgactttcttagttgcttgctcagtgacagctgctaatactttggttgtcccgcgttgccataagacagaagcgggttgtttcgtcagataatgccactgtactttgacagggcgtacatcatttgctgctcgattatcggtccggaccatcatttttctccttttgaatatcaacttgttgtgctgttaaatctggttgggcaagccattgttgcgcaatctcttcaaaagcggcgacagagcctgttgtgtacatccgtagcgtccctggcgtggttgtcgccaattgttgttgttgcgtcaagacttcttctaacatcgtaatcgcttggactgctgggttaaccaacgtcacgtcaggccccactgccgtttgaatggcggtcgtcaataatggaaaatgcgtacagcctaaaacaagcgtatcaatctcacttttttgtaaaggttgtaaaatctgattgacgatggtttgcactgcttgaccgtgtcgttggttggcttcaatcatcgtcacaaactgcggtgctgctaatccagtcacttgcacatcaggattaagggctgccatttgttgactgtaagccgcactttgaattgtgccagttgttgcaatcaccccgacacgtcgattatgcgtcgtttgtagggccgcaatacttcctggtttgataaccccaatcaccggaatcgccaattgggcttgtaagtcaggtaaggccgcagcggttgctgtattacaggcaatcactagcgccttaatctcttgatggcgtaagaaattagccatctgccaagcaaattcgcgtactgtggcagccggcttttcgccgtaaggtaatcgtgcttgatcaccaataaacaccatgtcttcatttgggaggcgtttgcgggcttctttgactagcgtcaaaccgccaacaccggaatccataaaaccaattggttgtttcttcatagtagtctttctcttttcatcacaaaatgcattcgtaaactctattttctcttttttttacctaaaattcaaccgactaccctttaaatactaaaaaataatctgatttcgcggtataatacaactatcttaattaaaaaatgttattaaaaaggagcaccgtcgtgactcaatcactttacacacaactcacagatacccctcaaaccgctacttacctagcccaagccacgctccgcgatatcttattaccgcttattttaggtgatgaaactgaaggcattagttattgggctggtaagcaattagctactaaatttccgttggaatcaattgcggatctcagtcaattcttcgaacaaattaactttggccaattatcgcttaaaaagcaaaagaaaaaccaatacttttttgaactcactggtccgattatcactaagcgactagccgatttcaaaacacccgacttccaactcgaagccggttttatagcccaaacccttgagcaacaattacaagtcactgctgaagctaaggcaaccgttgaaaataaaaaacgagttactatttttgttcaaacggatacaaatgatccgattgaaatcccgcttgaaacagaagcaatggtgaccatgcaatcgcctgaagtcacaccaatttcccccactgaaccagcagaaccagtgacaccagtcactactgaaccaacacctgaaccggaacatgaaccggtcgctaaagcttcctttagcagtgtggctaatctccctagccgccaagagttacaccgtcgtaaaaaacattaaatatgttcaaaaggacctgatgccaagtttgcatcagatcctttttttattatcccatctatcgtaatcgttcttgccaataggcttttgtatccgcctggaaaactggattatgcgtcgtgaccatcggtgttttagctgttggtttaagttgggcaacaatctcagttaccgccgtaatcccatcttgaaaagcacttgttaacaagctaatcccagcacgatccggaatttgattaccaatcacccaaatatctgggcgttcttcaatctgttctgcgcttaactgccactgatcaatcgtctgtaatgaccggcggtagccaagactgaccacggcttgatcaaatgtaatctgcgtttgatccgccaacgtgatgctcgtcacttgttgatctacctgttgataacttgcaaaaggctggcagtaatagtcaatctgtggataagcggttaagaacgctttttcagctgcttcatccacaaaggggcgcttggtcgttaaccacaccactgatttagcagtcgctaacaaatgcggcgccaattccatcaagttatacccagggccaattaagaccacccgttgatcccgataatcctcagggttggctggtgcataatggacgttttcaaaagtttgttcctcaaacaaccgtaattgtttagggcgaactacgccaccacccatcgctaagatcaaggtttgactataataccgatcatccggcgtatcaatttgataataatcttggtcggctaaatatttgacgtctgtcactaaggtttgagtgcgcaaaggtgtgtcataaaaagcggcctgcgctgttagattctgaattaaatcctggcccgtaatgttgggcatcccgccaatatcgtgaatcacacgctccgcataagtggcaaccttgccaccaaattgttgatccccttccaataattggccgtttaaaccgtataaaccagcttgaaaagcagcatacaaaccagctgggccaccaccaataatcgttgtctcgtaaatgttagtcattgcggtcatactcctctcatttcgttttgattagtaagtaaataaagtaaggggcaccgattaaggccacaataatgccggccggtatttcggcagtagggctcaatagcttgccacaagtatcggcaaccaataaaaagcaactgcccaaaagtcccgttaatagtaattgatagcggtgctgatacccgataattctgcgggcaatatgcggtgtaatcaacccgataaagccaatcccaccactaattgaaacactagcacccgccaagatcaccgcagcgccaatcaagtacaaccgttgcttttgaaaatcaactcccaatgaacgcatgttatcaggttttaaaacaaaggcatccaaggtttgactcttactgaaaatataaggcagtgttaataacaaccatggcaacagcgcccagataaatggccagctgctcccccagatactccctgctagccaagtcatcacaaattgataattatcaggagataacttcaaggtcaataagaccattaatgcagaaaaacaggtcgaaaccgcgactccggttagtaataggcgattggccgtaatccccacagacttttgatacgcgccaatcacgattactacagcgctgactaacgcaccaatcaaagctaataccggtaatataaaaatctgactaccttgatcggcggcaaatgtaataaataataaaaccgcaattcccgcacccgaattaattcctaaaaagccggtgtctgccaatggattttgcgtcgtactctgtaatacttcacccgcaatcgctaacgcaaagcccactaagattgcaataataatccgtggcatccgaaaatcaactaagattaacgcatcttgcgcttgaccctgaccaatcaataactggccgattgcttgtggaccaatcgctaattggcctgtttgtaagctaaccagggtcgttgcaattaacaaagccgacaacccgacgagccaacgccgataacgttttgtcatcatattcatgcttgactcgccccttttctcgctagataaatgaagaatggcacgccaattaaggcaatcataatgccaaagggaatctcttgtggtggattaatcgtccgcgaaatcaaatccgctgccacaaccagactggcccctaataataacgtgactggcatcaccttacgcacatcgtaaccaactagataacgtgtaatgtgtgggaccatcaagccgacaaaagcgacagacccaactaaggccactgaaatacccgctaaaataatgacacagataaagcccaataaccgcacgacactcgtcttgcgacctaaacttaatacaagttcatcacctagttgtaataaacgtagttgcggtgccaaacagaggcttgcaatcaagccagcaattaaccatggtcctagttgcgttaattgcgtccacgtaatcgccgcgacgcccccaaaatgccaaaacgctaaatcccgtttaagctgggtcattaaagaaaggccttcgcttaaagcaaccagacagctactaatcgccatcccggctaaaactaccgtcgtcgttttctgcgtctttttagccatactaattgctaagattaaacaggctgacagtgcggccccgattaaggcaaaaatagcagtttgttgcggtgtcgctttaggtaacacgataaagctgattgttaacatgaaccctgcacctgcgttaatgcctaataagccagaatcggctaatggattttgcgttagttcctgcataatcaggccactacccgccaaactagcgcctattaaagcggcgcctaaaacccgtggtaaccgaatttcatgaatcacagcttgttgtaattgacttgcgtgataatcaaaaaccgcatgatagaccgtcttcatcgttgtttgtgccgcaccatagcgaatgctgacaaccatcagaatggctaacagaatcaaactaatcactaaagaaaagccgaattttttattcatcatgatcctgttccccttctgaccagcgatcataagttaggattaagggacgctgatcatgttcgattaacgtcgcatcaatattaaagatgtgtcgtaaattatcacgcgtcatgacctcattgactgtcccactggcctgtaattgaccattctttaaggcaatcaactgatctgaaaaacgggccgcatggtttaaatcatgcaacgccatgataatggtgcggccttcaatctgatttaattcctgaattaataacataatttctagttggtgggtcaaatctaaataagtggttggttcatccaatattaaaatatctgtgtcttgcgccaaagccatcgcaatccaagcacgttggcgttgcccgcctgacaaggtactcaagaaacggtctctaaattgattaagccccgttcgttcaattgcccactcaattttttctttatcgaccgctgacaagggtctgaattgttgccggtaaggcagccgtccaaacgatactaaatcaaagacagacaaatcggtcgttaattccccaacttgcggtaataacgccatttcttgggccatctctttaggcgtcttagtcgctagcgcctgatctgccagcagaaccgtccctgaagacggtttcaacaaatgggctaacgtccgtatcaaagttgacttaccactcccgttaggtccgatcaaggttgtaatctgcccttgaggaatttgaattgataaatcctgaataattaagcgtcgattataaccgacactaacctgttgtgtttctaaaattgccataattccgctcacctttcgccggattaacggctcttacatattataagaaaacatttctcagataacaatcttatatgagaaaacaatatcaaaattccgaaacaacttgacagttacactgtaaacattcgataatgagaatagttctcaattatatttttggaggaaactcatgaaaaagtcaagtcgttttattgccattttaggattaacgtcattaatcatcttagctggttgccaagccaaaacagccactaagaaacaaactcgaaccatagccgatagtatggaccataaggtaagcgttcccacacaccccaaacgtgttattggttcatatctagaagattatcttatttcgctggatatcaaaccagtcgtgcaatggtctgtcaaaaatgggaccagtcgccaagactacctcgcaaaatacttaaaaaacgtccccactatcaactacgatttaccatttgaagcagttgctaaagctaaacccgatctgattttagtgggtgacaacagtgctgttcaaggtggtaaatatgctcaatacaacaaactagcaccaacctacgttgtcaaaaatggcgctaaagtcaaatggcgcacccaattaaaagatgtcgccaaagctgttaacaaagaagataaggggcaagccgttttaaaagactatgaccaaaaactagctagcgccaagaaaacaatccaaacaaaagcgccgaataaatcagccgctgttttatgggttacaaataactcagccttcatggtcaatgatcacgccgcaagtggcgcgctcctctatcaagacctcggtttaaaagaacctgagttggttaaaacaatttctaaaaacgcaaccgccgactggatgcccgtttctttagaaaaactaaccgaattagatgccgactatattttcctagttaacagcgaccgcggggctgctatgtttaaggaaccgatctggcaaaatgtcaaagccgttaagaataagcaactctacagctatgacaaatcatcaagctggatgtacaaaggcccaatcgcatatgaagaaatgatccaatcggtattgaaagtggttaaataagaagtgtgacttcaactgagtggttttgagcatttacttaaattggtgaattagcgatgcaatcgctagtttgacaagtgttgcaaagcacagaaatcaggttgaatgaacacgttataagaagtgtgactaagcaataaaaaaagcgtgctgacaattgtcagcacgcttttttagtttattcttcaaaatcttgtacttgattaccagcaacatcttgccatgaacgatctaagtagtcatctgatattttatatgaaaccttaccagccttcttagttgccatgaatggttggacatgttggtcaaccttcaaccaaccacgccagcctaaatgaatcgtatcttgcataaagtaatcttcgttaccatctttggtcatatcaacaatattgttaaagccttgtgatttcaattggtaagaaatctttgtcgagaagttatttaacatgtcttgtgataagcccgtataagatgcccaccgtgcgttaacaggtggaatgatgaattgcactgccatcttgtgttgcgcgaagaaatcgagcattaactggaagtcagaaaattctggtgaactttcataattaaagttactttgttcgcccttcaatttcgcttgatttggtaaaattcgttgttcataaaatttcttttgaatcccaaatggattaccggctgttgctttgcgaccaagtgttgtggcaacttggtcaagtgtttgtaagtcttgttcatctggtaaaactttcaagcctttagccaattctttttcacgaccgtgaatgaacaattgactgaagagctgatcttggtgttgcaagcctgggcgcttaatgttgttgatatacaccttttgcaccgttgttaacggtaagcccaacgccttgttctttaatgcatcccgcattaccccactggttgtatcactcgttaaatctagaatccgtttagctgcataccgtgttgctgctgaatccttagcatgaactaagaagtacgatgtttgcagtggtgaatagaagaaatcaaacatttctgatttaacccctcgtggtacaaaccattgtggcgaaataatcacgaccgctttcttacccgttaggtgttgtcctgtcgcttggagggataagaaatgtgttaatgactgtgtaccaggtgcgccaattaagaacggcttatttttccaatcatacttctcagccatgacggatggatgtaatggatccattcgtgataactcggaagaaccgataacgggaatataatccgtattaaacgcagcatccttgatggcttcacctttaatcacattggatgacattgatgtcgccgctgttgataaagtcttagcgctcggatgactaaagcgaaatggcgataataataacgcgcctaagcacgccccggcaattaacactggcccaaaaatcagccacaacttcttaaacatcttattgcaattcctttgctttggcgataattttgtttggtgttgcccattcattacgatcaaattctgaaactggtacgtcgatgtctaattgaccttgtaattcaagtaataattgaacagtcgccattgaatctaatgtccctgtttcaaataaatccatatccatatcatctttgatatcatcgttacccgttaaatctgccaaaatttctactactgtgttttctacatccatgattaaaacgctccttcaattgtttggtcttaatggaaccagagtcggtccaagaagcctgagaaaattaaaaaacttaaacatactgtgttaaatgttgcaaaaattgcgagataatttgtccaacgattgctgataatgtgatccttatgtttcttcttaaagcgtaaccagacatctgttaggataatccaaatcgcatggaataaaccataagcgatgtaataccaggttaacccgtgccagaagcccatcaataagaataacgttaaatagccaaggttggcgattaatactttgctcttagtgattttatgcttcatcaagaaaaacatgagccgcatgtagatgtaatctctaaaccaaaatgataacgtcatatgccatctattccagaattccttgatgtttggtgatgagaatggcttgttaaagttgattggtgtttcaatccccatgacataactcgtcccaactgcgaataaactgtaacccgcaaaatcaaagaataaatacatactatagacatacatgtaacccacaaggccccatgaaatatctaagaaaccgccgcgacttgccatggctaagtgcgccattcttggcaataacaaagttccgaatgcataacctaagataaacttatacacaaaccctaacatgaagttgtgcattgctttccctaacatgtcgatatagtgatcacgttcaggtacttttagataatccttcttaaagcgtcggtaacgatcaatcggaccggatgagatagttgggaagaaaagcatgaattgtaagaacaaccatggttcaaacttcttaatactcccatcacgggtttccataatcatgccgacagctttgaaggttaaataactaatccctaagaaaccaataatcgaattccgtcctggatttaaaaatggcacgaattttacaataactagcggcataatcgctaggacaaccgccaagtcgaacaatgctgtattattacgtttttggcgatacacggtgtagccccaaatgagagccccttcgaatatcacgtagccgattaaagctaacccttgattaatcttatcaccgtcaaagattaagaccaaaaagagcagtgaaacaagtgtttcatagatgtgccaccgtttaccatttaaaaagccaatgattagcggcactaacgcaattcctaaaataatgaaataattaggatttgcgtacggttgtaaattaggcattcccgtttacctctttaatcaacgctttacgatcaaccttaccattgacggataatggtaaactttctggatagacgaaacgttggggaatcatgtaggccattgtattttcagccagggctgcttttaacgtttttgttaatgtcgcatcccccacttggccttcagctggcacgacgtaagcaattaattgcgttacttgatgtgccttgttgtaacgagggaccgtgcaagcttgtttcacttgtgctagttgccctaaatgatgatcgatttcttctagttcgatccgataaccatgcatcttaacttggaaatcagtccgtcctttgtagaagattaattgattgtcatcggcaaccactaagtctcctgaatgatagaaacgttggccatctttttcgaaaaaggcagcattcgttttttcagggttatttaagtagcctttagaaacactaggaccactaatcaataattcaccaggctggccaggagcgacttcattgttttgttcatcaaccacaaccgtcttcgtatcagcttttgtataaccaattggtaaccgatcatactgtgctagaatatcggcggtaatttcaatgctggtcattgcgaccgttgcttctgttgggccgtaagtattgaagactttggcacttgggaagcgttcgagtaatttttcagccgtttggtgcgttaattcctcaccacagaagacgaattcacgaagttctgggtaatgttcgctatcaaacgttggtgcgagtaaacagatttcaacaaatgatggtgttgaaacccattcgttaaccttcaaggttggcaatacttcaaataaagtcttgaagttgtccgtaatttctttttctaaaattactaatgttgcacctgagcaaagccctggataaagattcatgactgataaatcaaatgagtatggggcttgaattaagacccgactattatcggcaactccaaaggctgggttcgcccagtcaacaaagctcaaaaggttgttttcactaatttgaactccttttggtaagccagttgtcccagaagtgaaaatgatatagaagttatcatccccttggacgctttgttgggcatcataatctgttgccccacttgccacaacgtccgctaatatatcagcttggaagaccggcatgtcaacctcaatttggctagctgacgcccatgatagaaccgccgctggtttagcaaccgattcaatttgttgaatgcgttctgcatctgagtgttgttcaaccggaatgtaggcatggcctgctttgacagcgcctaagaatgtcgccaccatttcgaactgttggcccccaaaaacaatcactggggcgcccttaggcaatgcttggtcttggataaacgccgcgattcgatcggatgcaacttttaagtctgcatatgaatactgcgtttgaccgtattgatacgctacagtttgcggttgttcaatcgcaattgtatcaattttttgaataatgctatttgtcatcaccattacgctccttcattaaactaaaattcattataaataaatttagggctaccaataccactgtaatcgtacaggtagagtaaaattaagagaattacaaaatatataatcgttctgccaatgaaattgacaactggtttttgccaaaaattaaggattttttgtcccattttcaccatttctttctcttttttctgattggtacgctttattactttattaaaggtaccacaccgatttaataaccaccactaacatttttgtcacacattattgaggactaaaaaaggacctggtaaagaaattctccccctggtccttcagttgttagagacgcttttcaacgcatgcttacaatcgtcgttgtgctctaatcagtatatttagctaatgtttccgttaattgttccttattgtggaagccagtaattgtttcgacaacttgcccgtcttttttaacgagcaatgttggaatagccatgatcccaaatttagctggggtatcagggttggcatccacatccatctttgtgaatttaaccttatcatttgtttgtgctaattcttcaatgacaggtgattgcatccgacaaggaccacaccaagtagcccaaaagtctgttaaaacaacaccttggcttgtttctgcttcaaaatctttatccgttaaaacatctaccatatccgcacctcctataatcagttgtgtaaaaccgattgcttacttttagtctacacttttgcccgccaaaaaacaattaaaaaaactcaaaagccggcattaccaatgcactagcttctgagtttttaatttcaataccttacttaaacgtcacaatggttgcaccattcccaccagcattagctggtgcatattcgtacttcttcacttgacggttagcttggaggtattcttgaaccccttggcgaatcgcgccagtccctttaccatggacaatcgtgacttgttgataattagctaatagcgccgcatcaatgtattgatccacttcggccattgcttcttcatagcgtttgccgcgtaaatccaattgtgctttaacgtggcgtgcgccaccgctattaacggttgttacatggcgttgtggtcggttatcttcaacgactttttgcttttctaaatcgtcgttggcaatcttcatcttgatgatgcccatttggacttcccaatttttcgagtcgacttggcgaattaaagtgcctcgttggccgtaagacgtgaccaatacgtcatccccaactttcagcgtttgacgccgcttagcccgttgaagcactttatttttcttcaaggttgtttcttgatgtaattgccctaattcagccttggcatcgattaattgattttccttaatctgtgcgccttgattcatctgcatgtcacgcaatttagtgatgactttatccgcattgacttcagctttttcgacaatcgcatttgctttttccttagccttcgtcatttccgtttcacgatcttcaaagaattgttgataagctgttgagagttgttgatgtagatccgtcgcttccgtcaattcatgacgtagtgcttggtattctgtttcagccgctttacgttgattttcaagatcggtaatcatattgttcaaatcttggctttcatcgttcattaactgtttcgcttgatcgacgattgaatttggtaagcctaggcgcgttgaaatatcaaatgcattactccgaccaggtaccccaattaaaagacggtacgttggctgtaaagtcgccacatcaaattccatgctggcattaattgtttgtggtcgattgtagccataaatcttcaattcaggataatgggttgacgcaaccacgttggctccgacaatcccgatttgatccaagatggcaatcgctaaagcggccccttcttgcggatcagtcccggcacctaattcatctaatagcaccaaactccgatcatcaatctgtttgagaatctgaatgatattttccatgtgtgctgagaaagtactcaagttttgttcgattgattgttcgtcaccaatatcagcaaagatatctgagaagacaccaacttggctttcctcacgcgcagtaatgaataaccctgattgggccatcacttggactaagcccaatgttttaagtgtgatggttttaccaccggtattcggaccagtcaccacaatcgcttgataatccgcaccgattgcaatatcattggccacgactttagtcgcatcaattaaaggatgccgtgcttgttttaaatcgacatggttttccgcattgattaaaggttccgttgcttttagagctttcgcaagttgggccttagcattcacgaaatcgagttgacccaataattcagcatttgctaaaatattgtgacgttccggcatgatagcttctgataattccgccaaaatccgttcgatttcttgttgttcttcaatttgtaattggcgcaaacggttatttaattccataatcgcttggggctccatgaatagggtttgcccactggcactttgatcatgcacgacgccaccaaattggccgcggtattcttgtttaacaggaatcacgtagcggtcgttgcgaatcgtcacgatcggatcacttaaatatttagccttggcaccgtgtgtgtagctggccatccgacttctaatctggccttctaactgcttcaagcccgttcttaaaccgcgtaacttggttgaagcagtatctaaaatggcaccatcatcagccaccgaacttctaattcgttcggttaattgtggtaacgtgacaaattgcgctactaattcgggtaaggcttttaattcgagttcgtctttttccaggtcatcaaagaaacgaaccacggcagatgtcgcacgtaaaacgcgcccgatttgagcgagctcactaccatttaacatcgcaccgatttcaattcgttttaaatgtggtctgatattttccagttggggcaatggaatgccaccttttaaccgttcgatatcaacaccatctttggtttggtttaagcgaatctgaatcagatctgcttcattaatcggttctaaagttgctatttgttcttgaccaaatgctgtaatcgcataaccttgcaacatttgtttaattttatcgtactctaatgtttttaatattttatgattcatttctgttaactccttctaaaaaaggggcgaccttcgtcagccccttacaactatgttaaccaactatccaccattgcgttacaagtgaggttaatagtggtgttttaagcaccatcatcttagcgagccacgaatgggccaacatgttctgtaacccgtcaactggtactaaggccaagacatataacactaagaaaatcccaatatagacaacgatgaagtttaaaacaccacctaaaaccttattaaagcgactgaaaacatacataaacgttaacgagttcagtaataagccaataaaacgaataatcaggccactgatgaacatcactaatacaaaggccacaccgatataaaaagctttatcgagtgataaccccaccttctgttggaaaaaggcaaagtaactttcttctgttgccgatggatacggcactaacaaattcaatttaggtccgagtgtctgactcaatggaaccgcaatccaaaaggcgataaaataaccaattgcataaacgacctgtaagacaattccccggcgcatcccagtataaaccgcatgtaacaacattaagataataattagacttagcataatttccccttaaccgcgcttttaatttgatatgattcatcactatcaggccaaccagttatttctggtaacctgcttcagacatcgcaaataaaatttgctacttcaactgaactattttatcatgaaataaggagaagtagcaattttaccattaatatcttattttaccattcattgaggaggatggcgcatgcaagctgtgataaaaatgaccccagcgcaattaaaaacaattcaacaaacttatccgtccaaccgtcccctaccacctggtgccgtttttgcccaccgtggtaacggtttgaacgttaccggctatcgctccggcaaagtcctttttcaaggcgcaacagccgaagcagccgccgctaaatggggcccactagcacctgccaagaaaagtaaggctactaaggggtctgctaaaggtgacacactaccacccgattttgctaactggtcggttatcggctcagatgaagtcggtaatggcagttactttggcccactgacgattgccgccgtctatgtcagtcaggaaaatctcagctttgtccgcaatttaggcgtcgctgattcaaaaacattaactgacgctcagattgatcagatggcgattaaaatgatgaccaaactcccttatcatatcgtcaatatcatgccgcaaaagtataaccaagttcacgaacaaatgaatatcgaaaaaatgaaggcggtcagccataacttcgccctcttaaaagttttgaaaaaaatccaacctgatcagccccaaggcattttaatcgaccaattcgaaccccgtgccacctactatcgttatttaaaagacgaaccggtggtattacgtgataacgtctactttacaactaaagcggaacagtttcatctagcggttgcggcagcctccattattgctcgccatcaagctaacctatcaatgattgaactttccaaactcgctggacgcgacatcccagtcggtgcacacaaatcgatcgacaaaattgcggctgatttattggaccaaggcggtttagagtacctaggccaatttgctaaattgcattttattaacactaaaaaagcacaggctttacgctcataatgataatagggaccaagacgatttagcgtcttgatccctatttttttatggcatagcctaattaaaacgtgcctcccaagctagagcggtcactctaacaaaacgtgccataccaacctgattcttgtggttagcacgtcagtcaaataatcgacagtctaattaaaacgtgcctcccaagctagatttctgcgcttagtgccggttgtcagattagcgatataatcgctaatctgacaacctatgctaatgctcaaaatctgatcaagcttgagaggcactctgttttattgcatattgtcgtctgctaagaatgtgtttaggacttcttctaccatttcccattcttcatcatcttcgattgggaagagatcgccttggctggcgtctcctgcaacgtctgatgtgaatgcgaaagcttggatgtcgacttcttcgtcttcagctgagcttgctgggtataataggacatatgatttaccgtaatcttcagaatcaaaagtaaagagcacttggtataattcttcgttaccttgatcatcgattaaagtaatttcttgttctgcttcttggtggatgttcttatttgtttcagtcattcatcaaaaccccttaatatttaattatcaaattcattaaccggttgctttaatacccttgtttcgtcaaagggcccttagcatccaaataattctgcaaaatcattaccgcagcaagtttatcaatcacttgcttacgctttttccgtgaggtgtcagcttgttcaactaacatccgttcagcctgaacagttgttagtcgttcatcaatataatcaactgggatctctgggaataactcggttaacatggcaccgtattcctgtgctttaaccgcccgggggccgattgaattattcatattcttaggtaaccccaagacaaagcccgttacttggtgctgtgcaacgagttccttcactcggtctaaaccaaattcagattcatcttcattaattctaatgatttcaacaccttgggcggtccaaccaaataaatcgctcacagcaataccgacggttcttgaaccgacatcaaatcccattaagcgcattatttagtattccccttatcaagatagttcttcacgagttcttcgataatctcatctcgttcgtgcttacgaattaagttacgagcgtcgttatagcgtggaatgtaagcaggatcccctgatagcaggtagccgacaatctggttaattggattatagcccttatcttctaaagtttggtagaccgttaccaatgtttcatgcacattcttaggactattcttaccaaaatcaaaatggactgttttatctagattcatctctcaacacctcaacttttcgctacttatacaaccatattctactcgaaaatcagtaaaagtacaactcgcatcactcggttgtcataatgctgaatatccactataccacaattcaaacggaacatgctgttttctgcaaaaaaataaagttgattaaaaataatcaactttattttttatctattaagctaagaattctttagcagctgccaaagcatctggaatcccagctggatttttaccaccagcttgggccatatcaggacggccaccaccgccaccaccaacaagtggggcgatttgtttgattaagtcaccagctttgatcccagctttaatcgcatcaggagctactgccacaatcaaactaaccttgtcacccgcaacagttgcgagcactaagacgtctgaaatttgtttttgttgccattgatccgctaattgccgtaattcattcatcccggcaacctttgcatctgctgccactaagcgccattgacctgcttcaacaacattttcaaaaacattgccggcttgttcttgcgcaaatttagcttttaattgttcattttctttttgttctgcttttaaatcagcttgtaattgttgaatcttcttaggaagatcctttgtttgtgcaacttttaattcaccagctaattcatttaaaagcacttgtttgtcatttaaatatttaaaggctgccttagaagtaacggcttcaatccgacgtgtgccagccccaatacctgattcactggtaatcttgaacaagccaagatctgaggtgttattagcatgtgtcccaccacaaagttccattgagtaatccccaatttgaacaacacgaactgttttaccatatttttcagtaaagagcgcgatggcccccatttgtttagctgtttcaatatcggtttcaaccgtattaactggaagagctgcccaaatcttatcgtttacgatttgttccacttcagctaattggtctggtgtcacttggcccaggttagtgaaatcaaaacgtaagtaatcaggttccactaatgaaccagcttgatgagtatgttcgcctaacacatctcttaatgcttgatccaataaatgggttgccgtatggttcttaacaacgccgcctctgaaggttggatcaacagataaggtatagtggacgccactgatcatttcttttaacactttaacagtgtgtaaaggttggccatttggtgcgtattgaacgtctgtgacttcagcaaccacttgaccggcaaggttcttgataatcccttgatcagccacttggccccccatttcagcgtaaaacggtgttgcttcaaagactaattgcgcaacgccggttgtcacactttcttgttcagcattatcttgaatgatatctgctagacgactttcagtttctaattcgctgtaacctgtgaattcactcttagtcttgatgtttaataagacttcgttttgtgagcccattgattgttcatcgctccgtgcattacgagcacgtgctttttgagcagccatttccttttcaaaaccagcttgatcaacggttaaaccttcatcttcagcatattcagttgttaattcgattgggaaaccaaatgtatcaaatagtttgaaagcatctgcgccgttaatttcagtttcgttttcagctttaacggcttcgattgtttggtttaataagcgtaacccatcatttaaagtttcgcggaaacgatcttcttcagaacgaatcactttttcaatgaagtctttttgttctaggacgtctgggtaatagctgtgcataatttcgccaacgattgggactaatttgtacatgaaagcgtcgttgatgcctaacttcttaccgtttaagatggcccgacggattaaacgacggagcacataaccgcgtccttcgttagctggcattgcgccatcgccaatcgcaaaggtaactgcccgtgcatgatcggcgataatcttaaatgaaatatcgtcagcggcattttgaccgtattgtttatggtcactcattgcagctgtggcttcaatcaatggcataaataaatctgtttcaaagttagttggggcttcttgaatcactgagacaagtcgttcaagacccatccccgtatcaatatttttgtgtggttgttcgacatattcaccgtttggtaagtgattaaattctgagaacacgatattccaaacttcgagataacgttcattttcaccgccagggtagttttcaggatcgtcttcactgacattgttgaagctttgaccacgatcgtagaaaatttctgaatcgggaccacatgggccttcaccgatatcccagaaattatcttccacttcgataattcggtcttctgctaaaccaactttttcgtgccagatgcggtgcgcatccttatccttaggataaactgtcacgtaaagtttttcaggatctaaaccaatccacttgtcgcttgttaagaattcccaagcccaaggaatagcatcttctttaaagtaatcaccaacagagaagttaccgagcatttcgaagaatgtatgatgacgggcagtcttaccaacgttttcgatatcgtttgtccgaatactcttttgtgcgtttgtaatccgcggattattaggcacaacacggccatcaaaatatttcttcaaagtggcaaccccagagttaatccataataacgttggatcttcgtctggaatcaatgaggcacttggttcaacatcatggcctttttctttaaaaaagtctaaaaacatttggcgcacttgggcgcttgtgagttgtttcatatcattctctccttaaaaaataaaacaccgctgcaaattcaaggacgcaaaagcgcggtaccaccttgattgcaacgatgttagtcgttaacctctttatgagtttattcaattatttaggcgttggggagcgcgtcaatccgtagtcagcacctctcagtcaagggtgttgttcctgtcgttctaatgattaacgtatatcccagcacttcaaaagtatagaaaataatccgccacttgtcaactactcgagtgcaacagtgattgtgcgccgataacgcgtcgcaagatcggtattgcccatcaacgcagttgatacgcctgattcataaaatggcgagcttggtaactgacgttcaagttgatagcgaccaccagtgacacacggcccacccttgtaaacaagcgggtcagttgttatttcataagcctgttggtcagccgtaaaatctaaaccaaacgaagccgctgattcagccattggttgtggtaaatgattgccacttggccataaagtgggcgcacccgcacctcttaaccattcgtactgatcaacactgacaaagtcatagccttgttgccgcaatgtttgtctgagttgttgatccgtgaaagtcattttctcaaaaacctgataaacttgttggtctgccaaaaaccgtaacactaagtgcgccgtttctaacaacggtgtctcaggctgcgttcggtatagtccattttgaatctcagcttgaaaacgactgaagaatagttggttgcctgtaaaatgtcgtgtgattggtgaatagcgcccttgcgctagccaatcacgcggtacggattctcgtgccaccagtaacgctggcatattaacaatccgactcggcgtggtgagttgctcaacatacgcatctacatcagccttatctgcccagagttgcccctcgttagcagccagttgccgattggtttgtgcaaaccattcactcggtgccagcttatccgcgcccaatgaccaacctaaactaacggctgattgtgccggaatgaagacgaactgttcaccagaaaaccaagcactatatgtcttaaatgttagtcgaccagcctggaccacttccggttgaatcccttcaatggcgacaagtgggctgacaaaataccgtaaaacctggccaaaattagcacgccgggcttgttccgataattgtaaccaatttggtaattgcaagtcattttcatgtaccatgacaacacctcatttataaactcattagcgattattattattgattttgttttttattattacgtttacgttcacgcatttcaacacgttgttcaatccgacgtttttgacgcgcatccttttggattgcttctttaatcttcttcttgtaaccaggcttacgcttgattttggcctttttaacaaagcccttcaagttaacgtctaattcatgagttgttgcaacccgttttttacgacggttacggtcataagaagtcaccaattcgccatctttaaaggcttttggtgtgaacttaattcccattgcttcgatttgtgcaacagcttgttcgtcatctggaccataaagtgtaatcgcagtacccttaagaccattccggcctgtccgacccacacgatgcacgaagaattctaaatcttcgcgtggcacttcggcattgataaccatgctaatcccttcgatatcaatcccacgagcggctaaatcagtcgcaacaacgtattgataatcgaggttatgaacttccttcataatccgtttccgttgacgtggtggaatatcgccatgaatcttagcgaccttcaaaccttgtgattggaggtaatgatggatgtcatcaaccttgctcttggtatttgcaaagatcaagaccatgaatggatggcccattgtgattaatgaatagattgtttgattgagggctttgcccttagttggcaccaaccagttttcaatcgttgggctaataatcgtttcatttttcacttcttcaattactgggttatgcatgtatttttgtaagaatggttgtaatttatcaggaatcgttgctgagaagaccatcatttgtaagtcttctggtaagcggctcgcaatattatcaactggcttcaaaaagcccatatcaagcgtcatatcagcttcatcaatgactaatgttttagctgtataaatcttaagtgccttacttgtaatcaaatctaaaatccgaccaggtgtcccaatcacgatttgtggttggtgttgttgtaatttttcgatttgacgttgtttatcagtcccaccaacgtagcgaccaatccgaatatcaccattcatatgctttgtgattaattcagcggccgtataaatttggtaagccaattcccgactaggggctgtaatgacgatttgaacttcgtctttttcagggactaacttatttaaaagtggtaataagaaggcatgtgtcttcccactccctgtttgtgattgtccgataacactcttaccagcgttgatggctggaatcacacggcgttgaaccgccgttggttttgtaaagtgcatctcgtctaaagccgtaatgatttctggttttagattaaattgtgtaaattgattatccataaagtcctgctttctattgtttaaatccgtcaaaaaagtatctgttactgtgctgtgtaatcagcagcaagcgctgataatgccgtaataatcgtgtcaatttcagcttgatcagctgctttggccccgctggcaagcggatgcccaccgccgtcatgttgcttagccaattcattaatgattggccctttagaacggaagtggacgcgataagtaccatcgtcttgttggacaaaaatgacccacgttaacacaccttttaatcggccaggtgtgccaacaattgaatgaacctgttgggctgatacattcaaacgtttttgcgtttcttggtccacaaccagataagccacttggtcgtcattaacctgcaattgatcaaataagtaaccttgtaacttcgcttgttcgagtgtaatctcgttcatccgttggttaatcttatcatgttgaatgtcaaacgtcatcagttgcgcggcacatgtcattgtgtgcggtgtggttgaattaaacatgaagcgcccagtatcgccgacaatcccggcgtaaagcacacgagcggctgcttgattcaattgtaattggccttggctatcgttgatcatatcaacaataatttcggatgtactagaagcatccggtaacacccaatttaaatcaccatagggttcatcgttaggatgatgatcaattttaatcaagtaagcaccttggttataatcttcgccactaatccggggcgtgttggcagcatcagttgtaatcaccaaagcgccttgatataaagccggatcaattggttgcgcattggctaaccaagctaagttgccggtatcactaccgacttggtaaacctttttatcagggtagctattacgaatcacttcagccaaaccaacttgcgaaccaatcgcatctggatctggattgacatggcgatgaataataatcgtttgataagctttaattttagcaataatttgttctggaatagtcatttattaacctctttctaaaatttggcaggtcacaattgctttggcaacaatgacgtgattggcataaacatcgacatcaattttagcggaacgccggccaatctctaatatccgcggtaaaatctgaatctgactttcaatttggattaagcgcagataatgcaaattaatctgttcaatcattgaatggcgttgatgtgtcgcttgcaacatgcgctgacaagcggccgaaacggcttcgctcaagacaccaaatgaaatcgtccctaaattgttggtcatttgcggactcacttcaaactgatacgctgccgaataaaattcagggaaactctcgctagggtgcagtagttcgataatttggtcgtagaaagtctcggccacttgcggttgacgttgggccgtttgcatattactcatcacgtcttggcgcgtgataatcccctctaattcgaggttatcagcaaccaccggcatgatttccaaactattccaagtcatcgcatgtccgacactggcaatactcatatacttcttaacactcgcaggttctttcgtcatcaccttatcaagcgtcatcgaagctggtttatccaaaatatccttcaccgtgacaatcccgactaagcgccggtgttcattaatcacggggaagcgtgaatgtttaaccgcggcactcaatttcttgtaatcgccgaccgtatcagtcgccaataatgagtatgtttctgaaaatgggcggtagattgaagcaaccgtcgtaatttcctttttgattaattggtcggttaatgcccggttaatcaacgtcgcaacagtatacgtatcataggtcgtttgtaaaatgggcaatgctagctcattagccagtgcaatcacttcatctgaggtgtgaaagccacccgtgattaaaaccgccgcgccattttccaacgctaatcgttgcacgtcgattcgatcaccaacgatcaataaagatttcggtgtaatgtaccgggtaatcgccgctaactgcatcgcaccaattacgaacttatccaacaacttattcaagccatctttgccacctaaaacttcaccatcgataacttgaacaatctcggcaaaagtcaggttttcaatcttaccttttaatttttgttcaattcgaatcgtgccgacccgctcaatcgtgctgaccaagccgttattttcggcggccttaatcgcccgataagccgttccttcactaaccgctagcgtcttggcaattgagcgcaccgaaattttatcgccaattggcaaattctcaatgtacattaatatttgatcatgcttcgttgccactcaaacaccaccgccgtttccgcttagttaatcctattttgcgccaattcgactattagcccattttcatagttacttacagtatatcggttttacccgacaaaaacaaagtaatctcatctatcattttcccaatcataaagtgggagcgttatattttcaaaagtctggggtgctaaattggtcacggtaatccctaacaagcgaatcccgacttccgcctgcccgattgattgccaaatttggttagcaattgcctctaattcggctgcattgccgacatactcaccaagtgttttgcgtttggtaattgtttcgtattgtcgattacgcacttttaaaacgactgttaaaccgtgtttttgatttttgcgcagccgctgggccaattcaaccgccaagcttttcagttgggcctgtacttgttcttcgctaatcaacggttgtccgtaagtatgttcgttaccgattgatttacgttcgcgttggtattcaactggtcggttatcaatcccccgcacatggcgatataacccataacccaacttgccaaaatgttgcatcaaaaacatttccgattgcgccaataaatcagcaccggtcataatgcctaaatcctgcatcttcggcaccgtcttttgaccaacccctctaaatttttcaatcggcaatcggcttaaaaaggcgattgcttgttccggcaataccaacgtccgaccagccggtttacggtaatcagaagccatcttcgctaaaaatttgttgtaggaaattccggcggaactgaccaattgcgtttcttctaaaatcgccttttgtaaataagcgacgacttcaatcgtgtgcgctaaccccaacttattttcagtaacatctaaataagcttcatcaaaagcaattggttcgattttatcggtcaccgtatggaaaatttcgtgaatctgcgccgaaacggactgatataacggaaagttcggcgtcttaaaaacagcttgatgtttaggaattaattcggcagccttttgggcactcatcgccgaatgcacaccatattgacgagcaacgtaattggccgtcgttacgacccctttgccccctgtgtcacttggatcacgggcaataatcagcggtttttgccgtaagtcgggctgctcacgttcttcaatggcggcgtaaaaagcatccatatcaatatgaataatcttgcgactcgtatcgttttccaacggaattttaaataattcagccattttacacctccactttcacgcgataagaaaagcctggtatgaatggcttcacacgcagacttctcggcaattcttatttttttgtttgagttggatcaaaaatccattttgcatctgttgaagccaacaaatccgtcgcttctttagggcccattgaaccgattgcatacgtaggaagcggtgtttgatctgcatcccaaacttgacgaatcgcatcaacaaattgccatgaagcagctaattcatgccaatgcgtaaagtttgtgccatcgccatttaacgcttctaaaatcaaacgttcataagcttctgggctgtcagctaacatttgttcgtcatattggtaatttaattggtcgggtttcaatgagaagccttgaccaacttccttaccgttgattgttaatgagaaaccttgttctggttccacataaatcgttaagacatcaggcgccatagctgagcgatctgacttatcatcagcaaaaatattaaccccggtcttcttgaagacgatgttgatttgagtttccttgcgggccaaacgtttcccggtccgaacataaaacggcacaccacaccagcgttcgttatcaatcatcactttaccggcaacaaacgtttcggtttgtgagtctggtgccacgttggtttcttgacgataacctggtttgctttcaccatcgaccgttgtttcagcgtattgggcgcggacaaagttttgtttaatctctgcagatgaataaggttggatgcttctgaacagacgtgtcttttcgcgttgcacatcttctgctgagaagttaacagggacttccattgccaacatcccaatcacttgcatgatatggttttggaacatatcgcgcaaagcaccagacgtttcgtaatagccagctcgttcttcaaccccaactgattcggctaacgtaatttgcacgttatcgataaattggttattccaaacaccacttaataggccattaccgaaacgtaaagcaacgatattttgaatcatttccttacctaaataatgatcaattcgataaatttggttttcatcgaaagtttgggttaattcttgattgagtgctttggcactttcataatcacgaccaaatggtttttcaataattaaacggttgaacccatctgcggtcaacaaggcttctgaccctaagtgactggcaattgtcccgaaataacggggtgacattgccatataatagatgcgattttggtttaattgatacttatcatctaatttcgctgctaatgccttcagtgtttcataatgttcagcatccgtaacgtcatgtgattgataatagaagtgactggtaaaggtttgtttcgttttgtcatcttcttcaaaaccttctagagaggccatcacgatttcgtgataatgttcatccgtccaaggtcgtctagcggtgccaatcactgcgaagctttcttttaagtaacccttacgatataggttaaaaagggctgggtataacttccgttgtgctaaatcccccgagccaccaaatataataaataatgctgctaaatctgagcgcatgttcacaccactttctttattaatctgctgcaattggcgtcacaaaaatgtgttgcgccgctttaatgccaacttgaatttcagtttgctgtgtttcgtccatcacggtaatggggctttcaaaaaggcccaccttcgtcaaggtcacagtatcgccaactgtcaagccgatttctaatgtgtatttcaataaatcattatcatctagtacccgttcaatcactgctttttcgccaacttcaaggtcgactaacgcgtgatggctctgttgttcaaactcacccttggcattgggaataatcccaccgtgcgggcatcgttttggatgacctagaaaatcggctaagcgttcagccaagtcgtggttggtcacatgttcgagttgctccgcctctggatgaacggtattaaattgataatgtaacttgtcgactagaaaaacttcccacaagcgatgattgcgcactaatagcgctgcttctctagcaccttcacttgtcaattgaatcccttgatagggtgtgtggttgacgtaattctctttcactaatttgttgaccatttccgtgactgatgctgccgaaacgttcaatcccgctagaatttccttattggtaactttttttgcgtcgccaccaagttcaaaaataatttttaaatagtcttctttattgggtgtcattgccatcccgatccttaatcaagtttgtcgacaaacttttctcagttctccctgaattaaatgaatgtctaccctctattatgccctattttggataatattaatactctcaagcttaaatttaggcaatataaaaaggattaagcccttcttgttcagcttaacccttttgttcaatttattttaaaattctgcctctaaaatgccttttaattctttaatcaatggttcttttggatttgtaacagtacagttgtcttcataagctaattcagctaactcatccacatgttgcttgaagtccgcctttgtgacgccattagctttcaaactcatttgaatgccaacactttcggccaattcagtcactgcatttgcataagcttcaacaagttctgctgtcgtattacccttcaacccaatataacgtgcgatttcggcgtaatcttcatcagctctgaagtaactatatttagcccagagtgcccgtttggttggcgttgtcgcattatagcggataacatgcggcatcgtgatggcaatcattaaaccgtgaggtaagttgaacgccccgcctaatttatgtgccagtgaatggttgatgcctaataacgcattcgcaaaggccatccccgccattgttgaggcatcgtgcatgttacctttggccgtaatatcgccatcgtaactagccttcaagttatcaaaaactaatttaatcgcctgtaaactaagccccttcgtgtagttagaagccattgttgatacgtaactttcagtcgcatgacagagcacatccaacccagtgtgtgcaacaactcgtggtggcacactctcgacaaattgactgtcaacaatcgcaacgtctggtgtcaatgcataatctgccaatgggtatttaatatgggtttcactatcagtaatcaccgcaaaaggtgttacttctgaacccgtcccggaagtcgttgggatacagattaacttcgttttgttaagtttagggaacttgtaagtccgtttgcgaatgtctaagaatttttgttttgcgccaaagaagtcggcttcttctgaatcatagaataaccacatccctttagcagcatccatgacagaaccgccaccaattgcgacgattgcatctggttcaaaactccgcatcgctgcagcacccttataaatcgtgtttgttgatggatctggttcaacatctgagaagatttgcatttgaacgtcattcgcccgtttagctaacacttcttcaacaatccggacataaccaaggttaaccatcccctgatcagcgacgataaaaaccttatttaaatcagccatcttttctaaatagttgaccgaatttttttcaaaatagattttgcttggcaatttgacccattgcatattattgcggcgtttcgccaatgttttaatattcaataagtcgattgttgagacgttatgtgaaattgagttatgcccataagagccacagccaagtgttaatgatggaatcatttcgttgtataaatcaccaatcccaccttgggcagatggtgtattgaccaatacacgacaagccttcatccgtcttgcaaattctaatggtaacgcatcgtcagtcgtatgcaatgatgctgtgtggcccaagccacccagatcaagcatcgcctcgcataatgccaacccatcttcacggtctttagctttaatcatcgctaagactggtgataatttttcatgtgaaagtggatattgatgaccaacacccttgatttcagcaattaaaacgggtgtatcttctggaatatcaatcccagctaacttagcaatattagcagctgattgaccaggaattgctggccgcacagcgtttttagctggatcaataattgcttcgtttaaagctggtaattcacttgctttagcaaaatagacaccttgtgcttggaattcttttttaacttcgttgtagattttagcatcgacaatcactgcttgttctgatgcgcagatcatcccgttatcaaatgatttcgatagaattaaatcattgactgcttgtttgatattggctgattcttcgatataagctggtgcgttaccagccccaacccctaatgctggtttcccagttgaataagcagccttgaccatccctggtccaccagttgctaggaccgttgcaatgccggtatgattcatcaaagcttgggtggctgccaaactaggttcttcaatgaataataaggcgtcagctggtaagccagctttaacggcttcttctttaatgacttctagtgctctggcagaacatttttgagcattgggatgaaaagcaaagatgattggattccgtgttttaatggcaatctctgccttaaaaattgtggttgaagttgggttggtaacaggtgttaccccagcaatgaccccgactggttccgcaatcttagtaatcccatgttcaggatcttcttcaatgacaccaactgtcttattatctttaatcgcgtgccaaatttcttccgttgcgaaaatatttttaatggctttatcttcataaatcccacgacccgtttcttcaacggccattttagctaattccatatgatgatcaaggccggcaatcgccatttggtggacaatatgatccacctttgcttgatcgaatgtttccatgattttaagtgcttcatgggcccgtgtgactaaatccgtcaccatcttatccacttcagataccgcatcaacaaccgctttaacgccttcttttttaaccatcaggaatgcctccataatttttatatgtgatttaattaacaaagaaagcataacgcatttgaaaccgtttgtaaaccattattgtgatttttttaacagattaaaaacaccaatttaacacatcaaattcataataacctatcacatcaccgctgattgtatttaaaatcactaataccaatcacaaaaaaagcatggctaatttttctatcgctagaaaattaaccacgctttttaaattactattttgtttcttcttttgattcgtcaaccgtttcttcaacaactgtttctgttgccttagcagttggttcaactgtccggatagcacttaagttaaacttaaggtaaacgccatcgcaatctaaaacaacaattttagtatcgttattcactgagtcaataacaccgtgtaaaccaccaattgttacgacttggtcaccttttttcatttggttaaccatttcttgatgtttttgttgttgtttcttttgtggccgcataaccatgaaatacatcatgaccatcatcaaaacaaggatgattaagaaacttgagttgccgccaaatggattggcacctaatactaagtttaacatttaaaatacctcttttcgttatttatctactaatcaactttagcagacttatcgcctaacttccagtgattcgctagaaattacggccgttattttcgttatagccgtattcttcgaagaatgcttctctgaattccaataagttatcttgttcaatcgcatcttgcacttggtgcatcaagttgatcaagaagtataagttatggtaactcgttaaatgaatcccaaaagtttcatccgctttgattaaatgacgaatgtaagcccgtgtgtaattcttgcagacgtaacagtcacattttggatctagtggtctgaaatcttcagaatatttcgcgttcttaaccactaaacggccttgagacgtcatcgttgttccgttacgcgcaatccgagttggtaacacgcaatcaaacatatcgacaccccgaatgacaccatcaatcaacgcatctggtgagccaacgcccatcaaataacgtggtttgtcttcaggcaacatcggtgttgtaaaatcaagtacccggttcatttcaccttttgattcaccaactgaaagaccaccgatagaatagccggggaaatccatccccactaaatcacgcgcactttggcgacgtaagtcttcaaaaccagccccttggacaattccaaataagccttgtgtggctgggttttgatgcgcaattaagcctcgttcagcccaacgtgaagtccgttcaactgattttttaacgtagtcataactttcgaagaatggtgggcattcatcaaaactcatcataatatctgcgcccaaagcattttcaacatgaattgctttttcaggtgataggaatagtttttcaccattcaaatgactcttgaaggccaccccttcttcactgatatcacgtaattttgctaatgagaagacttggaaaccacctgaatcggttaagacaccccgatcccagttcatgaatttatgcaacccgcctgctttttcgacgatatcttcaccagggcgtaaccatagatgataagtattcgacaaaataatgccggcacccatttctttcaaatcttcaggggccattgttttaacgctggcttgggtccccaccggcataaacatcggtgttttaaaagtcccgtgcggtgttacaatttcgcctaaacgcgcgcctgtatgtttttcttttttgattaaacgatacttgatcgctggttccatttaatcgactccaattctagaatttctacttgcttcattctatcagactttagtgattaagcaagaaaacacgttatttctctacgcgattttacgaataaattaggacttgtaagactaacatggccccaccaaaagtcagcacaaaagcgactactggccaaacgaaccgtaaccagtgagcgtatttaacatctaacatttgtaaggtggccattaccaagccagttggtgccaagaacaacattgcgtattgcccaaattgataggccgttaccacaacaaatcggggaatattaaccgtatctgctaacggtgctaaaatcggcatcgataagacggctagtcccgaagaagatggaacgataaagccaagcacgaagaatatcactaacatgatcaaaataaaaatcggaccactaacatgtgcgactaatgatgacgaatattgtaataaggtatctgaaatcatcccttcattcataatcaagttaatccctcgcgcaagaccaataatgagcgagacgcccactaaactagaagcaccgttcacaaaagcgtcgataacccctttttcgccaatgccctctggtcctgtcgcggttaaaaacatgatgataatcgcaaacgttaaaaatgacgccgccatcgttgggaaccaccacccttgagacataacgccccagaccataatcgggaaggtcaccacaaataagaccagaattaatttcttccgccaggtaaaaacggcttttgactgcgtcccctcagatgtaattgcccacatcttatcaaaagcgtcgtgatcttcatatgaatacgattgggtcggatcagccttgacctttttagaatagcgatagagataataaatgacaaaaatggcccctacgatacagccgccaactcgccacaacaagccttccgtgaaactaatacccgcggcgttagaagcaatcacaactgaaaaggggttaatggtcgagaaagtcgtgccaattgaactggcaaggaaaatcgcccccacacaaacaatcgaatcgtaccccatcgcaataaagaccggtactaaaattggataaaaggccaccgcctcttcttcaatcccacataaagtcccgcctagaaccatgagaatcgcgacgaaaaagattaacaaaaattcgtgaccttttgttttcttggttaaggccaacagccccgactcaaatgcgccgctagccttgaccgtgccaatcaagccccctaatactaaaataaaaaccataatatcgacagcttcaacggtcccacgaaccatactgttaggaacagctgctaaactggccggccgttgtttcaatctttggtaggtattgggaatcgatacggctgcattaatactgccagaagtgaattgactaattttgattttaacgccgagtcggtctaatgatgcctgtgttgctggcaccttttcaacttgacctgatggttttgtcacgaccagttgcgtactcttttggtcatacgataacttcgcgtaagatcctgacggcacaacccacgtcgccatcaccgcgaccactgtcagtatgaagaggatcacaaaagcccccggcattttaagtttaaaccgcttcttagtcttgattatttcagcatcattcatcatgccatctccttttttaatacatccctttaaagcgtttacaatgattggcacataaaaacccataatagttgtcttttaagacgatttattatgggcttttaaacttaatctcgagacgaagtgccccttaatttttacgccaagtcatctttaaagaaggctttttcaaaccgaaattctttatgctcataactcagcagtttttgggcaaccaactgtttaacaatttggcccgctgtttcacgggtagtcccactcattgtcgctaattccttcaccgtaattggatacggaatatatgagcggccgcaccgtagcggttcacctaagttaatttcaaatatttttagggcttgaataacccgttgtttcgcactagaagttaccattcgctggatctgatcttctgattcactaataatcgagcccatttcttgaacgactttaacaattgaatcggtattcttttgtaaaagatgctcaaaagtcgccattgggaaataaataatctcaatatccgtcatcgcccgagcggtgtatggataatattgatcagtaaacatcccccgataaggaaaagctaagttttgcttgatatacgtatagaacgtaaattcatcactttcatccgttcgttcagctcttacgagaccgcttacaacgaaatagaatcggctgcgctcatctgtttgatcaaacaattcctggcccttatgaaaatctttgactttcatattattcatcagaatgttcatttcttcatctgaaaaatcaataaattcaggtctggtccttaagtattgaatatatcttggatattcgtctgcggcaatcatgattttcgctcccaaagtattctcaattattactttttactcaaagtaaccaaagtcctaatataacatatctaaataacgattttccctgaaacaactaaccaaatcccgataattgcaccaattacaataattgtcgtgattaaccattccccttttgataagaaatgttggtgcccattatttttacgggcacgaccatagaagtaaatcccaggaatataggctataaaacagagtaataagtaactgacacccgccattaagattccggcaatttcaaataataaggctaaaaccccaattaataattgttgccgatttcctttttcttgaaggtgggcccaagaatatttaatttgataagctgccaccaacatgtaacaaacgataattgaagccgtacataatgaataagcgaagttataagctttcgttgtgaataataaggtgaataggaaaacttgaatcaaccccgctgtcacgactagtgcaaacgtcggtgcttttttcttgttgacgcgaccgaagtaagctggcaataaattttgctttgccattaacaacattgtttcggcaggtaacatcgtccaagataaccaagcccctaaaatcgagataattaacccaacaccgatgaagtagccaccccaagtcccaaccatctgttcaaaaatgtataacatcgctggttgcttgatgctagctaattgatcttgcgttaaatacccataaggtaaaacagacgctaagatataaatggctagtaaactcactaatcctaaaatcgttgctttaccagcatcggacttcttttccgcccgcgccgataacattgaagcgccttcaataccgacaaagacccacatcataaccatcatacagttcttgatttggctcatcacatcgccagcaacaaagctactactcatattattccaaaatgcttgtgtgaaaagatgacctttaaataacacaatcccaaaaataatgaagacaaatagtggaatcaatttacaaattgttaccaatgtattgatcgcagctgcgccttctaccccgcgattaacaaaatatgttaagctccacgataaaacactggcaactaagattgagggtaagttctgccctgatttaaaaatcgggaagaaataacccaacgcactcattaaaattgtcgcaaaagctacgttccccaaccatgctgacaaccaataaccccagccactaatgaagccggcaaaggggccaaagcccttttcagcgtaagagaaaatcccttctagttcaggttctttcatcaataaattattcaaggataatgccagcattaaaatcccaaagccaacaataacccatgcgattaacactgggcccggtgcggatgcactcgctaaatcagatgttaatccgaagaccccactaccaatagatgaactaataaccaatgcaattaatgccaataagccaattttttttgctggtttttcttccgtcattttaaaccactcctaaattacgtcactcaattattaataggttctgagcgcttttgataattcggccaacccttttttcagagttgcttctggtgcacaataccctaatcttgcatgtccgggaatttcaaaacgcttgccgggcactaataagacgccgtattcttttaataaatatttgcaaaatgcttcatcgtcttcaatctctttgaaatgaataaacgatgttgatactgattctggatagaccacatcaacgagtggttcttgtacaacccacgctttaaaaatctcaagattgcgttgaacaagcgcccgattacgggctaaaacctgcttgcgatgctgtaatacataaaccgctaactgatcactgaaaacaccggcacaaatcatggtgtaatcacgatattttctaaacaaatcggttaatgtttcgttagcgacaagccaaccaacccgaataccagggactgaataggtcttcgataaactattggtcgcaatgcccaattcatataaatcagcaatcgaagttgtttgttggccttcacctaatggtaaataaacttcatccacaaggacgtatgcgcccaccgttcgtgccacttcaacgattgcttgcatcagttcagtcgaaatgaccgtcccagttgggttattagcattgttcaaacaaatcaatttggtttctggtctaattaactttttcagttcagcaatatctggtacccaattattggcctcatccaactgccaatacgaaacggttgccccaattgagatgggaatttcgtagagttgttgataagttggaaacatggtaatcacgtgatcgcccggtttcactaaggcatagagcgctaataaattggcaccggtcgccccgttagtttgcaacacctgattactgttgaccgtttgatacaattcactaacagcttgcttaaaggcctctgagccctcaatcgcaccataattcatcttttgttgcgctaagtcttgataaaattgtgtcccgttatcaggcgagagggccatcaattctgacatggtcattgaggcaatcgtactttgcgcgatatccaaagttgcttgtgtttcgtacacgtttaaccactcttcaacgccgaaatttgcaatttccattagcttggcctctatttcgtaataattgtcccggcatcatgtgccaataaattcttcacgttatcaagggaagtaatgatggccttactatcaggacgattattaacgtattcgattgcggcttgaatcttaggtaacatgctgcctttagcgaattgatcgtctttgatgtaatcttctaattcagcgactgagacgttggttaatttcttttgatctggcttattgaagttaacgtagacgttatccacagctgttaaaataattaacatgtctgcacccactaattccgctaatttttctgaagcgaaatctttatcgattacggcttcaaccccgcggagcttgttgccttctttcgcaactggcacaccaccgccgccggctgaaatcgtgatcacgttaccttcaactaatttttgaataacgggtgcttcttgaataccaattggccgtggtgaagggactactcgccgccagccacgtccggcatcttcaacaaagtgtgcttctgggttgatactttgttgtttcttagcttctgcttcgctatagaaaggtccgattggtttcgttgggttttggaaagcttcatctttagcatcaacaatcgtttgagttacgattgtggcaacatctaaagccaagccttcttctgctaaaacttcgttaaaagcattttgcatccagtaaccaatttcgccttgtgacatcgcaccgaccgtatctaatggcattgctggtgtcttttcagaatcgctagcagcttgttgaatcaacaagttaccgacttgaggcccattaccatgcgaaataatgagttggtcgccttgttttacgaatgcaactaattgtttaaccgtttccttaacggctttgatttgagcgcttgctgaggcatcggttgataaaatggcattgccacctaatgcaacgacgattttacgttttgtcataatcatgtcctactttctgttaattaattgtggtttcaattaaaaaaggagccgggacaaaacaaagttttgttttccagcccctttctacaatctagttatgcttgaggtatgaataagttgcctaatgttgctgccataattgctttgattgagtgcattctgttttcagcttcttcaaattgacgggcatatttgcttctgaatgctttgtcagtaatttccatttcttgaataccgaattgttcgtcaatcttcttaccatattcagtttcaatatcatggaaagctggtaaacagtgcatgataatcatgttttcgttaccggtcttcttaaccatgtccatgttgatttggtatggtttcaacaagttaacccgttcttcaaacttatcttcttcacccattgaaacccaaacgtctgtgtataaaacatctgagcctttaacaccagcgtcaacgtctgaagtaatcatgttcttgctgcctgtttctttagcgtaaccttcagctaaatcacggacttcttgtgttggttgtaatgaatctggggcaacgatgtggatatttacgcctaacattgaacctgttactaacaagctgttagccatgttgttacggccatcaccaacataagttaatgtcacaccttttaacttgccgaagttttctttaactgtcataaaatcagcaatcatttgtgttggatgccattcgtcagttaaaccattccatacaggaacacctgagtatttagctaagtcttcaaccactttttggctaaagccacggaattcaatgccatcaaacatgcttcctaatactttggctgtatcttcaactgattcttttttaccaagttgaatatcatttttacctaagaattctgggtgagcccctaagtcaatggcagctgttgtaaaagcagcacgcgttctggttgaatttttttcaaatagtaaggcaatgttcttaccttctagatagtgatgtggaatcccttttttctttaaatccttcaaatgtaatgagaaatcgattaagtattcgagttctgatttagtaaaatctttttctgctaataaacttctgccttgaaatacgctgtttgtcatgttgatcaacctcgttttttattgtttatttttttaagtcttctcttacaagtggcatactcatacaacgtggacccccacgaccgcgtgataattcacttgatgggacttcgatcactttaatgccgcattgacgtaagttttcgtttgaaacatagttgcgatcataagtgacaacaacgccaggtgcgattgctaatgtgttagaaccgtcattccattgttcacgaggggcaacaactgcatcgccaccaccacatgggattaaggttaattcaggcacttccaaagcatcgcggagaactttttcaagatctgtttgatgtgtaatcttgatttcgtcgttattgcctggttctaagatataagtgtcaaccatgccgccagcaccttggatgcctggatgaatggtgaacttatcataatcaatcatggtgaagactgtgtctaaatgcatcatggcatgattatgtggaatcttaattgctaagattttttcaaagccactgtggttagcaaataataccttggcaagttcttcaattgattgtgcggaagtccgttgtgaaatcccaattgcaagcactttatcgctcaagattaattcgtcgccgccttccatgcggtcaatgtgatcgcggtcgcgccaaacttgtgcgccttggttggcaaaacgaggatgatgttgcatgatgacttccatgaacattgattctctttggcgagcttcaaaagtcattttattaattgttaagccatcccccattgatgcggcaggatcgcgtgtgaagtataggttaggcattggatccatatagaatggatagtcaccatcagcactaacgtcaatcaatgcctttgatttaatatcgatttcgttggtccgaaccccagccataattttttcaaccatgtctaacgttgccatactaattaagtagtcttttaaggctgcttgaacttgtggtgatttgatgtgtgattcattcaacatcttatcaaggaaagcttccttaacgtcaccagcatcgattgcttcggcagcgaggttttctaagtaaagcacttcaacaccattgtcacgtaatgtttgtgcaaattgatcgtgttctttttggattgttggtaaataaggaatatcatcaaacaataaacgatacataatgtcaggtgtaatgttttcgacttctttacctggccgttttagtaagaccgtcttaagttttccgatttcggaatttacatgaattggacttgtcatttaaaactacctcctttgtttacaagacctactatagtcgcgatggtaatcgctttcagggggattcttacacttttaatgttagcaatttcacgttttataaccagaatcctatcgcatcaattgataacgcttactttaaaaacataaaaaaaactaagatccctgagtatcttagtttcgtttggacaatttaattttaaactttattttaaaacgagttggtaagcaaagcgtttaggtgacggatcatcagcaatcaagatatcgccacagtaagtaaagcccgccttttgaatgacgtgttgcatggctaaattatcgggatgcgtatcgattctaacatcgtgcgcgccgtcaatactggcggccgtaattaataacgtcataagctgatgggccaaatgttggccgcgaactgaaccatctaaggccatccggtgaattgaataatagggatgactagaagcaaccgattgccagtcaccattagtaattgcactgtagccgtcatcaactgtatcgacaattgatgcgacaccaacaatcgtatcatccttaattaagatataacaatattcttggcgaatatcattttcaaactgactttcactaggatcgccagcttgccactggttaacaccccgttcttttaacgcggctttagcaccatcgataattgctgaaattcgtggtaaatcagaaaaaacggcttttcttaaatacatcaatgctcacacctcgattacataatttatttaacaaacatggcatcgccaaagctaaagaaacgataacgttcatcaacagcatgttgataagcatttaagatgttttcgcggccagtaaatgaagccactaacatcactaaggttgattttggtaaatggaagttcgtgataaaagcgtcaacggctttccattggtaaccaggtttgatgaagatttctgtccaaccactatcagctttgatttcgccatcaaacttcgttgcgattgtttctaacgtccgaatgctggttgttccagtcgctacaatccgaccaccgttttgtttgacttcgttcaacgttgcagcagcttcttctgttaaacgatagaattcgctgtgcatcttgtgatcttcaacgttgtcttctgaaacagggcggaaagtccctagaccaacgtgcaatgttaagtaaaccaatttgatgcctttatcttgcaccttttgtaaaagttcttctgtccaatggaaaccggctgttggtgcagcggctgaacctggttccttagcataaactgtttgatacatttctggatcatctaatttttccttgatgtatggtggcaatggcatttcgcctaaagcttctagaatttgcatgaagatgccgtcgtatttaaattcgatcatccgaccgccatgttcaagttccttagtgacaatggctcttaattggccatcaccaaagaccacttcagtccccactttagcccgtttagcaggcttcattaaaacttcccattcatcgtcatgcgtattgtttaataacaagacttcttcatgaccaccagtatcaggtttaacaccgtataaacgtgctggtaaaacacgcgtgttgttcatgacaactgcatcgccagggtttaattcgtcaataatatcgtagaaaaccttgtcttctaaagcaccagtttcgtgatccatcactaataaacgtgatgctgctctttcaatcattggtgtttgtgcaattaattcttctggtaaattgtaatcaaaatcttctgtggataccatgtggttacctctttctatttttctggataaggcatgcctaaatgggcataaccagccggcgttaccatccggcctctttgcgttcgttttaaaaagccaatttgcagtaaataaggctcgtaaacttcttcaattgtttcgttttcttcaccaatattggcggcaatggtttttaaaccgactggtccgccttgataataatcaatcatcatctggaggattttgcgatcgacaccgtctaagccccgaatatcaacttgcagctgacttaatgcgtgatcagcaatcgcctgatcaatcgtattttggtcagccacttgtgcgtaatctcgagttcgtttcaacaaccgattggcaatccgcggcgtccctcgcgagcgacgtgcgatttctaacgcgccatctggcacaatcgacatgttaaagacgccggctgagcgttgcacaatgtccatcaaatcagcttccgtgtagtaagccatgtgttccacaattccgaaacgatctcgcaatggcgcagacaataagcccgcccgcgtcgtcgcgccaatcaatgtgaatggtggtaatggaaaatggacgggatgtgcggtgggcccttgaccaaccacaatatcgatgtagaaatcttccatcgctgaataaagtaattcttcaaccatcttaggtaagcgatgaatttcatcaataaataaaacatccccgggttgtaactcgtttaataacgccactaaatccccaggccgctcgattgcggggccacttgtcgttcgaatctggacttgcaactcgttagcaatcaccatcgctaacgtggttttccccaaacctggtgggccataaagtaaaacgtgatcgagggactcttcccgttttttggccgcttcaatatagaccgctaattcatttttaacccgatcttgaccgatatattgtgcaaggacttgtggccgcaatgttttttcaatgcttgcttcagcaaaatcatcgttttcggctgaaacaattcgctcatctgccatttaaagtcctccttatttcttcatcaataaccgcaaaccttctctgagatattgatcagttgtttgcgctgcaaaatcagttaacttaggcgtaatcgctttgacttcccgtgcggaataaccaagcgcactcaaggccgctagtgcatcacttaattcaggtgaatcgccttggctgcctaaatcaattgccgtttggccgactaacgttgcgctttgttctagatcacctaacttacctttaagatctaaggcaatctgttgggccgtcttcttcccaacgcctgggaacttcgttaagtacccaatatcatcgttcataatcgcctgaattaagccagaatgatcactgttagccaaaattgccaaggcactcttgggaccaattccggaaacactgattaatttttggaaaagttgtttttcatctaagtcgtaaaagccaaaaagcgtaatatcagtatcgcgtaccgcttggtggacaaaaatttgaaccacttcgctcatcgattccgtataccgatatgggttggcaacttgtaattgatagccaattccttggacttccaaaacaacgtaatacggattaaccgccgtcactaaaccctttaaatattcatacataatctaacctactttatgagaacatatatttgcttgctaaattgtaccataaatacagagtgtgattcaaaacgatttggctgcgagcattttcttagtatcgtgaataagcgaccccgtcgattatttgcgatgcggcgcaaagcacaacagccagttttgaagaacacgtttcaaattaaggtgtgatacaaagcgatttggctaagagtgcgattagtacttgtttagcttttgagcattaacaaagagtgacgaataagcgattcaatcgcttatttggcattcgtcgttaagcgcagaaagctagtactaatcgcacgtttcggacattatgcaagtcatttttagtctcatctgttcaccaaaattgggatcagtcccgccctactcggtcctaatcccaatgattaatattctcgtatttttggtggttgataagtcgcaataaacgtcgcaatttcagttaaagaatcggtaaacaagtatttttcaaaatcgccttgtgttaaaaagccttcttcaaccatgtgggctaagaattgttgtaataaatcataataacccgctacgttgtagaaaatgcaggggctatcttgctggccaattcgcgcccacgaaatcacttcgctcatttcttctaacgtacctggtccaccgggtaaagcgatgaagacatcggctaattcaatcatttttgatttccgttcggccatactgtcaaccatcaccaaatcgcttaagccagcatgcgctggttctcgttaatttaaaaattcaggcatcacaccgactacccgaccaccgttttctaaaacggtatcggcaatcgtacccatcaagccaacccgactcccaccataaattaattgatcttgtcgtttgactaaccaatggcctaaatcgctggcggcctgtgtataaaccgggcgacggccactgctggccccacaaaaaactgccacattcaccatttttatttcctcttaattctgcaacattcttgcaacggtgctgactggtaaaccaaccacgttgtaaaagtcaccattaatcttattaattaatagcgcacccgcgccttgaatcccataggcacctgctttgtccgcatattcattctgatctaaatactgttcaatctcggcggtgcttaaatgccaaaatgtaacgtcggtttggacaaccttttgttgcaccagaccgtctttcatcagccacaatccagtataaacttggtgtgtctgaccacttaactggcgcagcatttcataggcatcttggcgatccttgggtttgccataaagcgtcccttgaaaactaatcgccgtatccgccgctagaatggtcgccgttggatatcgaaccgcgactgcttcacccttgcgttgcgctaaagtttggacataatcgcccggtgtcgttagcggtgtttcatgttcatcaatctgtgctggttgtacctcaaagtcatttacaacgcgctttaatagtgcctgtctgcgcggtgattgcgatgctaaaataaacattattcgccctcccaactatgatgtggttcttgaatccgtttaaacatcttttccaaatctttttgcgtgtagtgaatcaaaaccgggcgcccatggggacaattaaacggattctcagtcttcgctagatcagccagaagcgctttggcctgggcatcatctaaatgatggtgcgctttaatcgattgcttacagctcatcataatcgccgtcttctcacggaattgggcaatgctaatgcgaccgtcttttaaaacatcgtcaatcatcccacgaatcgtcatttcctcttgtccctgttcaatccaagttgggtgactgtggaccacaaaactattctgcccgaaattttctaattgaattccgactgccgccaagagttcagttttttcctgaatctttagcgcatcactattcggatattccaaaacaagcggtactaacaagttttgcacagaggtgctgacttccccaattttttctcggtaatactcgtacttaatccgttcttgcgcagcgtgttgatccaagatataaaagccatcttcgccttccgctaataagaaagtactatgcagttgcccaatgtagcgtaactctgggaaacgaacagtgggttcgactacggtttcatcgctttcgtccgtttcgtctaccacttgatcaccaaacggcttcccaaccgcctctgtcgcgtacttctgatcccactcggccaatgcctggggttgctcaaataagggccgctccggtgtcatcgccggcgctttagcagttggtgcggctaacggcgtttcagtttccgcaatttcgggtatcgccggtttgaccgttgggattggcattggactgactggtcgcaccgtaccgcttgggtgccgtcgttcttgtgtaatttggtttaaattcatctggagctgatcaacatctaccgtcttggtccgtttcaaattctgcatggcatctggaattaaattctcggttgccagtctttctttgattgccccttcaatcaaggtcatcaaggcagtttctttgcttaagcggacttcctgttttgttggatgcacgttgacatcgatcaatagcggatccatctcaatcgctaagacggcgattggatagcgtccgaccatcaatttagaaccgtagcccttgataatggccttattcaattggtaatttttaataaaccgaccattaattaaaatcgacaaataattgcgcgttgcccgcgttaattccggcaatgacacgtagcccgttagtttaaaatctaaatccgaagcactcacggctaagagtttcttggccatggtgacgccataaataccggcaatcgtttgttttaaatcattgttgccggccgtttttaaaagtagatggtcatcattggttagcgtaaaggcaatctgtggatgactcattgctagccgattgacgatatcgacgatattcgccaattcggtttgaaaagtcttcacgtatttcaatcgtgccggtgtattaaagaataaatcccgcaccgtaatcgccgtccccggtcgaatcggatttgttttttgttcctctaacagaccacccttaaaatgagcaaaggttcctagagagtccgcagttgccgtttcaatcgttaaatcggaaacggacgcgatactagctaacgcttcaccccgaaaccctagcgattgaatcttgaacaaatcttgccgagtcgcaatcttactggtggcatgccgcttaaaggcgactggcacatcttctggttcaatcccgtcaccgttatcgatcacttgaatcatctgtaaaccggcctgttcaacaacaatatcgacttgcgtactattagcatcaatcgcgttttcaaccaattccttgaccactgaggcggggcgttcaatcacttcccccgccgcaatttgattactcagaatttccgacagttcatgaattttccccatcatctaatcctctcagttcactattaatgtttatttaattgcttttgccactcatataattgattgagggcttctagtggtgtggcgctcatcaaatcaaaattcttaattgccgctaccactttatctgttttcttatcgaccggggccgccacttctggttcaaaaagcgccatctgttcttcgacagccgctgcagccggttgtgctggtacgactgttgctggttgcaccggtgcttttggtttatcttctaattgacctaaaataacatcggcccgttgtaataaggtttctggcatgcccgctagtttagcgacatgaatcccgtaagacttatccgcaggtccggccaacatcttgtgtaagaagaccaactcgccgttttcctcaactgcaccaacatgcacgttacgaagggcggtcaacgtatcggctaaagccgtcagttcatgataatgcgttgaaaagagtgtcttggcgtggacgtgatcatggatatattcgataatcgcttgcgccaaggccatcccatcataagtggccgttccccgaccaatttcatcgaagagaattaaactattggcggtcgcactcataatcgcacggttggcttccatcatttctaccataaacgtactttgtcctgaaatcaaatcatctgccgcaccaatgcgggtaaagatttggtcaaatacaggcaagttcgctgacttggcaggtacaaaacaacccatttgcgccatgatgaccgttaaggccaattgccgcatgtaggtacttttaccagacatattaggtccggtaattaataacatatccgtttctttgcccatttgaacagcattggggatatatttttggcgtcccaataccttttcaaccaccggatgacggccatcgactaaatcaatttcgcgactatcagttcttaatgttggttggacatagtggtagctttcgctgacgaccgcaaaactttgcaagacatctagggccgctacgcctttagccaatgtttggagccgttcaatttgtaacttcacttgttcccgaacttgggtaaacaattcgtattctagagcggttgagcgttcttccgcctctaaaatcagttgttctttttcttttaattccggtgtgatgaatcgttcggcgttggttaacgtttgtttgcgttcataccgcccttccggtaatgaactcaagttagcccgcgtgacttcgatataatacccaaagacgcggttaaagccgattttcaaattatgaatgcccgtagcttctcgttcttgcgcctctaattgcgccaaccactgcttgccgttagacatcgcattgcggtattgatcaagttgttcgtcgtaaccatcttgaataatcccaccatcagtcactgaaatcggtgaatccgggttaatcgctgtttcaattaacgtccgcacatcatcaactggatccaaacgcgttaacgcttgatcaaaagcctgcgtttcgttaatgcccgtcaaaacatctttaatctttggaatctgttctaaggatgtttttaattgaatcaaatcgcgaccattaacgctcccaaaagcaacgcggcctgctagacgttccaaatcataaactttagttagggcttcttgaaggttcgtccgttcaaagtaatgctgtaagaaactagcgacttggttttgccggttcttaatctggtttaaatccaacaatggtcgttccaaccattgttttaataagcgaccacccatcgcagtctttgtttcatccagtagccacaataacgtcccgctcttatgaccagttcgtaatgaagccgtcaattcgaggttcatcttagccgaatgatccaacttcaagtattgagaaggttcataggcttgggcgcgttgtaaatgacccaagtgccgcttttgcgtcgttgctaaataaacaactaattgtttaatgacggctaacgctagtggttgtgagatgttttgagaaacaaaactgacctctgccgtatcggccccctcatcttgataagaaaccaagatttgttgttggacaaaggcttgaacgacttcgcttgggacatcatgattcacaaccacttctttggtttgtaaactcaacatttcgtttaataacacatctaaactactgatttggctaaccttcatttcacctgtggataaatctgtataggcgaagccaaattgatcgccctgtgcaacgactgccgttaaataattattttgtttagcgtgaccggctttttcgtccatcacagtcccaggtgttactaattgaacgacttcgcgtttgaccatgcccttagccgttttaggatcttccatctgttcacaaatggcgaccttgtaaccttgatccactaaaatatcaatgtagttttgcgctgcatgatggggcacaccacacatcggaatggggtctgctgcattcttattacgcgctgtcagcgttaattctaaaagttgtgatgctttaacagcatcgtcattgaataattcgtaaaaatcacccaatctataaaataaaaaggcgtctggatattgatccttaaccttttgatattgggccatcattggcgtttcttttgttttttgcggcattttcaagcccctttctatctcttaaaagcgtgatccgaatggatgatctggtgaaatatggatgggtttgattgatttggcatgacctgtttgatcaccaatttcaattaaacagccattcaattggccaggaccttctgtcactagttcaaatcgttctgggcgttgcgtcataaaccgtgaaatgattttttcgcgtttcacaccaagaatcccgttataaggacctgtcatcccggcatctgtcaacactgccgttccgtctggtaaaacacgtgcatcatttgtttgcacatgcgtatgcgttccaactaacgctgaaatccgaccatctaaataccaagctaaggccaatttttcactcgttgtttcggcatgaaaatcgacaaaaatacaattggtttccttgctgacttgggccaccatgtcatctaacattgcaaatgggtcttctaacaattcgcccatcaatgcacgaccttgtaagttaataacggctaatttagcctgattgacgttaatcatcgtcataccttgacctggcgttcccttaggaaaattagcgggtcgcactaactttttggcatcatcaatgaagtccaaaatatcccgtttattccaagtatgattgcccatcgtaatggcatccgcaccggcttgcaataagttcttgtaatccttttgtgtcattcccttgccatcagcgatgttttcaccattgataatggtaacctgtggtttatattgttgtttcaaaagtggtaaatactcgttcaccattttttgtcccattgtgccaactgtgtcaccaataaataatattcgcatgtcgcgccccttaatgttgtgtactaactttaatagcttctattgtagcaatttttaccatgaataaaaagttctggccggtgcttaatgaaacaaaaaaacttgaccttaactattttagttaagatcaagttttggtaacgtgcttctcgagcagccttttccggttaactacaaaaaggtcattatggtataacccaccataatgaccttttttacgttaatcctcaaagcctaaccagctcgagtaagcacttctaatgtttcaagtggtaactgtatgttgagataatgatgttttcacggctggcaaaagctgttcttaagcgtaaacttgattggttatgcaaaatgttttgccatggttttcttggcacaaattgtggtaccaagaccgttgtcgtgaagtttcgtttttgggcattcttgctaacaatatccacaaaacgaacaattggtttttgaattgaacggtatgatgaatgcacatcgacaaagcggacgttcgggaaatcagccttaaattcagcttgaatttcacgttctttttccggattttcatctgtcgacacgtgcatcgcaatgacgtaatcaccgattgattgtgcataatcaagcgccccgcgggtaacttgagtcacgttgctgaccaagacgatgacggttgaaccatcataatcatgtaagacagcttcgttggcacttactcgtaattgacgtgcaaccttcttatagtgatcatgaatcttatagaaaatccagatcataattggcatgatgatgaagaatggccagatatcaggtaaacgataaacgaataagatgattaaaatggcaaatgaaatcaaggcaccaacaaagttagcgattgatttgccaaaccaattcttaggccgttcaacccaccacttacgcaacatccctgattgagaaagcgtaaatggaatgaacaccccaacggcgtataacggaatcaaacgtgatgtgtcaccgttaaagatgaagatcaacgccattgaaccgattgccaatgtgataatcccgtttgagtaacccaaacgatcgccacgatccatatacatatgtggcatatatttatcttttgctaagttataagccaacactgggaatgctgagaaaccagtattagcggcaacggctaaaatgaaggccgttgcgaattgaacgatatagaagaagaaccctttaccaaaagtatgttgtgcaacttgtgataagaccgttactttttccattggcacaatgccgtaccagtagttcaagaatgtgatgccggcaaagaagaaccctaagatagcggccatgattgccaatgtttcagcagcatttgtggcccgtggtttcttgaagaacggtaccgcattactgattgcttcaaccccggttaatgaagatgaaccagatgagaaagctctaaagatcaatgccattgaaatccctggtacaacggccccaactgttgctgttgcgtggaatggaatcgcacctgtgaaaattttgtaacatccgacgataatcatcaaggtcatcatcaagacgaataagtaaactggcaccattaagaacgacgctgattcgcgcatcccacggaggttcatcgccattaaaataatcacgatgacaaaggaaatccctacctggtgcccgtacattgccggaattgccgaggtaattgcctcagcaccagccgaaatactaaccgcaactgttaacatgtaatccacaagcagtgaaccacctgcgactaaacccgcattcttacccaagttttcacttgaaacgacataggcgccaccaccacctggataggcgtggataacttgccgataagaaagggttaaagaaatcaataacaccaatacgaacgctgcaattggaattgaataccaaattgctgctgcagaaagcgttgttaaaacaacaacgatttcttcggtcccgtatgcaactgatgacaaagcatcagaagacaacattgccagggccttgaagcgccctaatttctggttaccttcatcggaagactttaatggtttcccgatgaaaatccgttttagttgttgcattgcaatataactcctttaattaatcgtatttctatacataaaaagccctcatgtgataatcgcctgttaccatttcacacggtgacttttgaatataatatcctacttaaaaataattgctgttttttcgaacaaaaggtattctactatatctgacactaaaatactacaagaatttaacttaggtacctatctattctaaccatcattgaccgttagttatagcgtcgattagctaaataaaatctatttcgacgggcgccttgcattcattataagctaaaaaacgataataaccagcgttaattttgaaaacaacagtaaaaaaggccatccccagtaaaatgctggggatagccttggttggaccgtactgctttaacgtgttttttggttgcaacaacctccgcttaactacaaaatgggcattatggcaagaatcaccataatgcccatttcaccgttaatcctcaaagcctaatcagctcgagtcacacttctttacttaacgtgcttttcaaaccatgttcctgcggttagctacacaaatcaaacgattgctgcgcaatcatccgccttgttaggctaatcctcagaacatcccggtttgaacacactcattttaattacatcatgccgcccattgctgatgggtccatgcctgctgctggtgctgggttgtcttctggtttgtcagcaaccactgcttcagttgttaacattagagcagcaacactagctgcgttttgtaatgctgagcgtgttaccttagttggatctaagatacccgcttcaatcatattttcccagttgccgtttgctgcattgtagccaacttcaacaggttgtgattttactttttcaacaatgactgagccttcaaggccagcgtttgttgcgatttgacgaacaggttcttctaatgcacgaagcacaatgttaatccctgtttgaacgtcgccttcttcttcaagagcggcaacactttcgatgacatcgattaatgctgtcccaccaccggcaacgtagccttcttcaacagctgcacgcgttgcatttaaggcatcttcaatccgatatttttgttctttcaattctgtttctgtggcagcaccaaccttgatcactgcaacaccaccagctaatttagctaagcgttcttgtaatttttcacggtcaaagtctgatgttgtttcagcaatttgtttcttgatgttttcaacacgttctgcgatagctgatttgctaccagcaccttcaacgattgttgtatcgtcttttgtaacagttaccttaccagctgtccctaattgatcgattgttgtttctttcaattctagaccaaggtcacttgtaatcactgtggcacctgttaatgtcgcgatgtcttctaattgttccttacgacgatcaccaaaaccaggggccttaacagcaaccacgttgaatgtcccacgaatcttgttcaagacaagtgttggtaatgcttctccatcaacgtcatcagcgatgattaataaggctttaccttcttgcacgattgattgtagaagtggtaaaacatcttgaatatttgaaatcttcttatctgtaatcaaaatgtatgggttgtctaagtcagcttccatcttgtcgttgtcagtcaccatgtattgtgacaagtaaccacgatcaaattgcatcccttcaacaacgcttaattcagtatcaatcccttttgattcttcaactgtgatgacaccgtcgttacccactttttccatagcatcagcaattaaacgacccgtttcttcgttagctgatgaaacagcagcaacttgggcaatcgcatctttgctttcaactttgtgtgaaatttcgtgtagcttcttaacagcttctttagtggctaattcaatcccacgacggataccaactgggttagcaccggctgtcacattcttcatcccttcgcgaataattgcttgggctaaaacagtagcggttgttgtaccgtcaccggcgatgtcgttcgtttttgaagcaacttcagaaactaatttggcacccatattttcaaaatgatcttctaattcgattgctttagcgattgtcacaccatcgttagtgatttctggtgaaccgtaagctttttccaaaacaacgttgcggccttttggtcctaatgttgtcttaacagtgttagctaattgatcaacacctgctaacatttttgaacgtgcgtcttctgaaaatttaagttcttttgccatagttatttcacctcaaaaaaattttttagtttgtttttaaacgtttcagtttattattcaataatggcgataatgtcttttgcgtgtaataccaaatattgttggccttcgtattcaacttctgaaccagcatatttatcgtaaatgacttcatcattttctttgacatcaagtgggattcgctgaccgtcactggtcattgcgccggcaccaacggcaacgactttaccagtttgtggtttttgtttggcgttacttgcaatgacaatgccacctactgtttgttctgcttcgtctttaacggcgatcactacgcgatcttctaatggttttaacacttaaaatccctccatcactttttcttttttagcactctaaacactcaagtgctaatcacattttttatcatagcattttttcagaacattgcaagtattttgctatccccttttgcattttagtagtcaatgcgctacgctatggtcacatcaactttcaggagcgtaatcatgactcaaagccaacaaaattttaggctgattatcagctatctcatcattttattaatcccgagtgccctcgtccgcttttttggcctgtcggatcaattctatttattcaccacaatcacggacagcctcggcgcacttttattactctattttaattatcggggcccaaaaaatagtcttgagaaacaccccttgccgcttaagaaagccatcatctggggcattagtggtattttactcgcgttaatcgtccaaattatcgctggttcaattgatcatctactctttaaaaatagtacgcaatcactcaatacgctcactctcatgacggccctcaaagcccaaccgtggttgatcattattctaacgattgctgcgccaacaatggaagaactcgtttttcgaaaggcgatttttggcggtcttagcggccgcttaaattcggtattagccgcactcatctctagtttattatttgccgtgattcatcaagacagtcatctaattatctacgcggcaatcggccttttcctttgttggctgtatcgcaaaacgggttccatttatacaacgattatcagtcatgcgggaatgaatctcgtcgtgacgctcttttatctcagtcattaaaaaaatagagcccatcaaccgacatcactgctggttaatgaggctctatttattttgacgcttcttctgtattataattatcaaggaaataaattaacgtttgtaactctttcgctaaatcaacattttgaatccgaatcgtattcggtacagaaattcgaattggggtaaagttcatgatgcccttaatccctgcatcaactagttgatccgttactttttgagcaacttcgattgggaccgtcaagatgacgatttcaatttgttgtaacttcaattgttcaaccatttcgtccattgaataaaccggcacacctgtttggattgtgccaattaattcaggtttaacatcaaaagcagcgctaatccgaatattattcgtttgtctaaagttgtaatttaacaaagcatgtcctaaattaccgataccgatcaaagcaacattcgttaagcgatcttgattcaacgtcttcttgaagaaactcaagagagactcaacatcatagccataaccccgtttaccgagcgcaccgaaatatgaaaaatcacggcgaattgtcgcactatcgactttaacagcttcagatagttcagttgacgaaatcttggtcttacccgaattgtttaaaaagtttagataacgataatataaaggtaaacgcttcgctgtggctcttggaattttattttcagccatttggaacctccgttcattcttttacttgtgaaaatatccctacactatattgaaatgatactgaattttcttgtgaaaagcaattaatttactattttgactgtctttgccctaaatctgttatgatagttgaaacggactttaacgattccttaaaatggtaccttaaaaacacgacatcgaaaggattttacattgtgatattattacaggttcaacaagtcgctcgtcactttggcggtgactacttatttaaaaatgcacaattggaagtgcaagatcacgcccgcgtcgccttagttggccctaacggtgctggtaaatcaacacttttgaagatgattgctggcattacgacgcccgatgatggtcaaattattctgggtaaaaatgtccaagttggctacttagcccaagatagcggtcttagttctgaacggaacatctatgacgaaatgctaacgattttcgaaggccttcgccaaatggaagctcagatgcatacgttggaacaagcaattgccgatccagatgctaatcgttcagatgaggactaccaagccctcttaaaacaatacgatcagattcaacacgacttttctgaagcaaacgggtatggttacgaagccgaaattcgtggtgtattgcacggtttccaattcccagaagaaactttcaccaaaccaatcagcacgctatctggtggcgaacggtcccgcttagcacttgctaagctattacttgagaaaaaagacgtcttaatcttggatgaaccaactaaccatttggacattcaaaccttaacatggcttgaaaattatcttcaaacctatcccggcgcacttttaaccgtttctcatgaccgctacttcttagacaagattactaaagaagtttacgatatgagtcgccacacattaacgcactacaccggcaattacagtcacttcttgacgcaaaaatcagccaacctatcactcgaatggaaggcttatgaaaaacaacaagccgaaatcgagaaactccaaacattcgtcgacaaaaacttagttcgagccagcacgactaagcaagcccaaagccgccgtcgtcaacttgaaaagatggataagttagaacgcccaaccaacgacgcgtctaaaatccacttccattttgatatcgatcaaccaagtggtaacgaagtcttgcaagtcgttgacgcggccgttggttattcagccgacaaagtaatggtcgaaccgattaactttgaggtcaacaagcaagaacgcttagcgattatcggacctaatgggattggtaaatcaacgcttttaaagagtatccttcatcaaattccattcttaaaaggtcacgaacgtgttggtagcaatgtttctatcggttattatgaccaagaacagcgcaacctccacgctaacaaaacggttcttaatgaattatgggatgaacatcgcaccacccctgaaaaagaaatccgcacacttttgggcagcttcttattcaccggtgacgatgttttgaaagtcgtttcacaattaagtggtggcgaaaaagcccggctgttactaactaagctagccatgaaccatgataattttttgatcatggatgaaccaactaaccatttagacatcgatagtaaggaagttttagaacaagccttacgcgaattcgacggcaccgtcctcttcatctcccatgaccgatatttcatcaaccaagtggcaaccggcatcattgaactatcaaccaccaccggcagcaagcgctacttaggcgattacgactactatctcgctaaaaaagctgaggaagaagccttcgcacaagccgctgaagtgccagttgaagtcagtgaccaacctgttactgctcaagataattataaagccagcaaggaaacacaacgggctcaacggaagttagaacgagaagtcactgctttagaagaacaaatggcaacactcgaagaacaagcaactgccattcaagaaaaaatgacgcaagccgatatcatcactaaaccattggtcttgcaggaattacaacaagatttagaaaaagtgcaagcagaccttgcccaaacagaagctgattgggaagaacaagcgatggcactcgaagaatttactaattaaaaaccagaaaaagcgcgtatcgtaggatacgcgctttttttagccaacaatttgtttgccaaacggactcaatgataaacttgctaatttaaaatgttggtgggcaaatgggatgccgacaattgtaattgttaataacaagccccagaaaatatggttggcccataaaataaagcccccaaagataaaccagacaatatttaataaaaaggagcctgcgccaccactcgaaacaactcgtgcgttaaatggcattaacgtcaaaccaccaattttaaaacattgtaagccaactggaatccccacgattgtgacacaccacactaagccggctaaaaaccaaccaactgcgctcactaagccaccgaaaatccaccaaataattgtgcctaaaagactcatcagctactcctcctctactcttttctccgattatacagacttgtccaaccctaatcaaaaagcccgcctaattaattaggcgggctttgtttttaatcattaaccgattagtgctaacgcttgtttcaagacggtttcgccatccatcatcccgtaggctttcatatcgatcacttcaacaccaatgcctttaggtgccaatttttctttaaattgaccttccataaagcgtacttgagggcctaataagacgcaatcaatttttttgttttctaattggttatctgcatctgatgcgccagttgcgaagatttctgcatcgacaccttgtgcttctactgccttttgcatttttgaaacgagcaagctagttgacatacctgccgcacaacataacatgattgttttttctgccataataattaccccttaatttttttaggttgaaatgaaagaattgtacagaaagtgaaatgaagcgttttcatcactgctgtaaattcagtataagcgctttctaaataattgtcaattaatgttattttttaatttaaataattgctgattcccctttactgactatttgttaataaattaactaataactagtgttattttatattctttttttcaacctgactttttacgtcaactatgtttaaatggcatttagacacttttttttggaggcaacatgtttaaatttaaatcactttatctatttggttatggccttattctgagcgccatcgtcggtatcttgctcggccttttttatagcttacaaagtactctaattagtcttttctggcaaaaagcaacctttggtagcctcttagacgccattatgctgatgatggttggcttagtcatcattatttcacgacactattttgggcccctcccacaaaatttgggggtcattaaggctgatctcaaacaaacgggcactgctaattatcgctatgtccttttacaaatgctgattccggctgttattttggtcagcggaacgagccttgggcctgaagcaacattggttagctcaaccttcctctacagtatttggctcgctgacaagcaacgctacgtcgccgcgcattttgatgacttacgtgcacaatcaataggcatgagattaaaagtactcgcgacaccgcaccgctatctattgcattatcaacaaccaaccgccccactcaccaaagtagcaacctgtcaaaagaaagccctcatcacaacttactttttaaatgggactgcgtggtttagcggcgtcttcatcttaaccggcgaaccgtcattaattattcggcttggccaatcgcactggcaagggcgcgatctctattggtttttaccattagtgctcgggggttatttactcggaaaactttggttggccggcatggtgggcttacgcaaaattatgcaagcccgcctcaccaacgatcaggtccgcgtcttaatcggtggtctggcgattttcttagccagcctctttttcccacacattctcttttccggtcaacataactttcatttattcaccacaatttggcaagatcaatcaatgctttttttaatgagccgctccctattaaaactaattttattaacaatctgtttgaacaccggttggcttggcggggatatcttcccggttttgtttgcttcaactgctcaagggatggcaattagccagttattcccgcaagttgattccctctttgtcattggtttaattgccatcagtatgggcagtgccattcttgaagccccactggtagctggattgattatggttattttattcttaccgcctaatctcttttggattggcatcctcgctactggcatcgccttaggcttagaaaaataccgtcaacatcatcaagcacgccgtgagcagcaccaaagccaaggtgcgcgactacatcaaagtgaagcctaacaaaaggggggctgagacaaaagtaaattttgtcccagcccctttttttgttatctaaatattgatggtctaaacgtgttctataagtcatatccttccggttaactctgaatctcaaacgattgcttgcagcaatcattcgccattctgtgttaatcctcaggacatacctaacttatgacacactctcttttttaaacgtgttctataagtcatatccttccggttaaccctgaatctcaaacgattgcttacagcaatcattcgccattctgtgttaatcctcaggacatacccgacttatggcacactctcttttttacttttaaagttcgttttgatacggaaagtccaaactagggacggcgtttaaatctaaatcagccagcgtgttttgcgcaagtgcaacgtgggcagcagcgccaatcatcgcgccgttatcgccacataagcgtagtggtggcatgattaaatcaagatctaatcctgctgattcaatcccagccgctaagccttctcgcaagccttggttggccgcaaccccgccggcaacaactagttgtttaacctttagtgattgtgctgcgcgaagggttttagtgactaacacttcaacaacacttgcttgaaagctcgccgctaagtccgcttggtccaatgtttcaccgatttgatcagcatggtggaccgtattgataaaagcactcttgagaccactaaaactgaagtccaagttatcttctttcaacattgcacgtggaaaattaaacgtatcttggcctaaatgtgcgaggcggtcaatttccttaccagctggatatggcacacccaatacccgtccaatcttatcgtaggcttcgccagccgcatcatcccgtgtatcaccgatgatttcgaattgacccgcagcgggcatataaactaattctgtgtgaccacctgaaaccaatagggctaacaagggatattcgagtggtttaacaaagcgggccgcataaatgtgcccggccatatgattaaccggtacaagtggcaaatgatgcgcataggcgattgccttagcggctgtgaccccaatcaataaagcgccaactaatccgggaccgtaagtgacggcgaccgctgttaaatcatcataagtcacaccagcttgttccagtgcttcttgtgtacaaagtgtgatttgttcaacatgatggcggctagccacttctgggactaccccgccaaaacgttggtgactcttaatctgtgttgcaatgacattacttaagatgcgttggccattttcaatgactgccacactcgtttcatcacaacttgattcaaaggctaaaattaattcttttttctccgtcattttgttactcctattgactcagtatgcggcacatactgaatgcatcttctttttcctgaacataataattgcgtctggttttaacgactttaaaccccatccgtcgataaacagactgcgcgcctgtgttaccggtacggacctcaagggtaattttttgactcggataatcccgcgcaagtgcgaccacctcgtggactaaaaagtggccaatccctcgtttttgaaagctaggacggaccgcaatattcgcgatgtgggcctcattagttgaaaaccaagcaccaacaaacgcgaccacttctgagccttggcataatactaaataaatcgatgtccggcgcttgctgagttcactagcaaaggcccaccgatcccagggtgttttaccgccatagaccgagcgttcaatatcaatcaacgctggaatatcgctctggctggcacgcgccaagtaaaacggctgatcatcaatcatgacttgccgcgtaacgtaggggagctctttttttaaccaaacacgtgggcgtaggtattccctaaacttgttccacataagctgccgatccttgatcgtcatgtgttttaccccagttgacctctgcttctgtctttctgagataatgtggcccaaagccatggatgtcaacaactggttcagcattagcccccaattggcctagaacagctgcgtgtggcaagttatggttggcatcgacaaaatgggcctgactacctaaagtggctttaatctgtgcgttaaactgttgtacgtcaccgccaacaaaatagacaggttcatttaataacgccaattgtgctaataagtcggttaatgccaaatgttgatcagcgaccacgttttgtaagtgctggtcttgccattgataaacaccggcaaaaacgttgtcccggcgcgcatcaaatagtggcacaatcaaagcggttgtttcttgaacgttccccgctaaaagtgccaaactagaaatcccaactagttccttacccattgtccaggcaaaagacttggccgttgtaaccgcaatccgcaagccagtatatgaaccgggtccttgtgccactacaaaacggtcgattgcttcaattggtgtcttggtttgttttaaaagttgatcaatcattggtaacaatgtttgactgtgggtttgccgaatattgacggtcatttcgcctaatatttgttggtcttcaagtagcgccacactcaccgcttgattcgaggtatccattgccaatagcttcattaatgtcatccttcttctgcttataatccttgttattctagcataaattagcgattaaatcgacacgcgtcacttttagttgcactaaaaaaaccaccttgataaagaataactttatcaaagtggtcgttgtttttaaaattattgaattctgtctttcaaacgaacaattggttcaaaatgcatcacgaggtaaatcacaatcggatgaatgaccattgtggcggcctcgcccactgcccttgtagcaaagtggacactgattggggtctgacttaaaattgatacccaccatgaatttaggccgagattaacgacaacaaccaccgttaataccgctaaaatcacgcgtaaccacgtaatcttttgccggtagaagaaacagccgtaaatgaatgcacctaagaaggctgataacgtgaaaccggggaaatagccgcccgggacaccaatcatcaaactattgatgagatcgccaaggacggccgctaagcccgcccaaactggcccaaaccaccagcccattaaagcggtgacgataaaaccaaaactaattctgtaaatcgttagcgaaatcgcaaagcgcgcaatcactaattgtaaagcgattagaacagctagtaatacaacgcgtctggtgtctagcttcacaccaaataaccgatcttgattaaccataaaaaaagcatctcccttttggagttgccacaaataacactgcggcgaatgcgggactaaaaccgcgagcattactgctcttcgtctggtgttcacattccgttccaccagcacttaacgctttaatccctactccgaatctttttagaacttactaaatgtaccaccgattccctgaggatacaactattcagtttgtccacttcaaaatatatcatctcaatgtggttaaaatttgctatactggaactaattaagcttgattatgaaagggactgacaactatgaaaaaaatcctcgtcttgcacactggcggtacaatcgccatgtccgctgatcaagacggtgcagtcgcaccaactggtcaaaatccaatggccggttttgaaaaattattcgataaccaactcacaattattagtgaagaatttgcgaatctgccctcaccacacattacaccaaccgtgatgttagcactcaagaatcgcattcaagcagctgaagcaactggtatcgatggggtcgtcatcactcacgggaccgatacacttgaagaaactgcctacttcttagacctgaccttgcctaacaacgtgccaattgttatcaccggtgcgatgcgttcttctaatgaaatcggctcagatggtcttcataacttaattagtgccgtttggaccgccgcttctgacgatgcccacgataagggtgttttagtcgtcatgaacgatgaaatccacaccgctcgttatgtgacaaaaacgcacacgacaaatgtcgctacttttagaacaccaacttttggcccaattggtttggtcagcaagcacgatgctaatttcttccaagaattaattcgttctgaaatctgcgatatccaagaattggttgaaccggtcttcttattaaaagcttatgccggcatggacgggacgctttttgaagccatcaatcagccaactactaaaggccttgtgatcgaagctcttggtgctgggaatttaccacccgcaacactacctgccatccaagccttactggaccgcaatattcccgttgtgctcgtatcacgctgtttcaacggtattgccgaagacgtctacgactacgatggtggtggcgttaaattgaaaaaaatgggcattactttctgccagggcttaaacggtcccaaagcccgcttgaaacttcaagttggcttaagtgctggtaaaacaggcgctgacctcgtgaacttcgtcagcaatgccgtttcataagaaaactaactaaaaaaggagtgtgccataagtcgggatatcccgaggattaacacagaatggcgaatgattgctgtaagcaatcgtttgacattcaaggttaaccggaaggatatgacttatagaacacgtttaaaaaagagtgtgtatcataagtcgggtatatcccgaggattaacacagaatggcgaatgattgctgcaagcaatcgcttgagattcagggttaaccggaaggatatgacttatagaacacgtttagaccatcaatatttggataacaaaaaagggggctgggacaaaattacttttgtcccagctccctttttttgtatctgaaacgtacttttagcaatacgcttatcttttagtccatgctatttcggcttctgctgcgctgaggtcatccacggctaccttgtggcgtgtcgtcattatgtcatccaccatcacttgttcgacctggctttgtgtcatttggccgtattgaatttcatgaccataacggatattaacacttgtcacccgatgatccatcaagaaatcataatccaaggcgtctaacatccattcaaaataatggacgttattgacgtgttgattgccatcaatatcaaaataacgcacgcggtattctttttgcgatgccttttctgagtctatcttcttaatacgtgggaatcgtttgctacctttgattgccattgattcaaacggtgccatgatttcggggacaacgggcaccatactgcgcgtttcataagacatcatcacaaaaatactctggacaaagacgcactcgttgcctgcttcatcgtacaaccaaaaattccgataacagaaatagcgattataactctctgcttccgtcacaatccgcaccttttcatccactttgggcatccggttaatcgtcatttgatattgcgtgacaacccagccaagatttaaactgtgcattgtttcttcgccgacattgaggtcattgagttggtgttctgaggccaaaattaaaacgttaaccaaggatgctaaggtcaattcgcctttaatatccgtttcaaaatacggaatccggtattcctctgtatactgcttgcctgccatcttatttcctctattctgttaaatcgtggtacgcgttgtagaccacctgtttcttcaagtcattggccttagcgaccgttttaatggcaacattaggactagccccttgttgaatctgggcttcgacttgttctgatagtgataaagtcggattggtgtccaccacacttaggttttgaggtgttgggttgcccgctatgataatcacaaattcaccgcgcatttcattatcagttgcccaagttaaggcttcttgtaaatcaccgcgaataaattcttcaaacttcttcgtcaattctcggcctaaagtcacttggcgctcgccaccaaaaccgttaatcaacgcttgtaacgtcttttttaaacgatgaggcgcttcgtaaaagatggttgtttccggctttaaggctaattgcgcgaccgtttccgttaattctttacctttacgtggtaaaaagccaaagaacgtaaagggttgcggtgtaatcccggaagcaattaacgccgtaatcccagcatttgcgcctggtagtggtacgactgcgatattggcttcgatacaagctttgaccaattcatgacccggatcgctaatcgatggcatccccgcatcactaacttgggcaatatcgtcgcctgcttccaatttttcaatcaacgtttcaatccgttgttgcgtattatgttcgtggaaactaatttgtttggtttcaatttcaaagtggttcaataatttttgcgtattgcgtgtatcttcagccgcaattaactgaacgttttttaacgtctcaattgcgcggtaagtcatatcacccaagttgccgattggtgttggcaccaaatagagcaccccttgagtggttgttttaaaactagattgtgtttgcatgtttaattatcccttcacgccgtaatgactcgagcttataaaagcgggcgccgcgacaaataatcttgcctcagcgccctgtttgcgttgcttaatgattaatcagctgtccgttcgccataaataacgtcgttacaaaaggcgcatggttcgtcgttttcacgtcgcgagccatagaaataaggacagatatgaaagccttcttcatacagattctgtaaattttgtttagacttagacaaaccttgcgataaatctttggtgtcagtttcctcagttgtttgttgtaattcctgaaggtgttctctgaggtgtttattttcaatctctaattctgcattttcttccagaactttagataaaactgccttcatttcagtgatgccgtcaaacgttaacttggcctgctgctcaatagttaataattgttcgtataagtctgttttactcaacgtttacatcctcccgatggccttttaagctaatttttgaactacgatccgctatgctactgcgattaaatttaacgttaaactctctaagacgttttggcaactcacattttgttcaaacgtgcgttgggccgttaaaacgaattctgtttgcgccacaatctccgctgcggtcatttgttgactaatggtgtttaactgtgtgcgatactcactaaaacaaagatcacccgccaaatcataccggcagtttaaaagatcttgataccacaaaccaattaagtttaaggcgatcttttgttgggaccgatctgtcaataacggtagtagttgcgtttgaatcgttacaaaactctccaaatccttttgggcaactttttgggcccaactcgtgattttagcaacgacttgcatcagccagtcttcggccaataattgttgggcctgcgttaagtcactcgtcaagtgactcaacagctgtgcctgcgctggtaaaatctgcgcttcttcaaattgttgacgcaccatttccttcggcagattggctaagtcaatcacttgaagccgcgataaaatcgtcggtaacatcagattcttattgctggtacataaaattgcgtagacgtttggcgccggttcttccaaaaatttcaataaactgttggccgcactagccgtcaatgtctctgccgcttcaataatgaaaagccgctgactcgattccatcccactcttagcaacttcttgcttcaaatagcgaatatcagcaattttaatgctcttaccgtctggtttaatttcgacgacatcgggatgattcccagttaaaatccgctggcattcaggacattgatagcaaggttgactgtcttcattgacctgttggcaaaaaagacgcagtgctaaccattgtgccaattgcatcttacccacaccttgtgcaccggctaataaataaccatgtgctaactgcccacgcgcaataatctgggcaaactgctggacaagcttgggttgcatttgttcaattgttaaagtggccattgtttagaagcggtggaattgttcgattggcatcacaaagacggttgccccaccgacttgtacttcaatagggtaagacattgaactgtccattgtggcatccatattgataggaggtgtcatgaattgttcgcgtgcttggcacgtttcttcaataatcttcaatgcttctgggacccgttcgtcttcaatccccacgataaacgttgtattgccagatttcaaaaagcccccagttgttgataacttcgttgctcgaatgttggcatcaattaattcactacttaataagttactgtctttgtcttggacgattgctaataataatttcatcttaatctctccccttatacttcaaataaatgcggatttgcttgtgcgatgacttgtaaacattgtgtcacaaccgcttcaaggggttgtgaggcatcaattgttttaatccgatctgggtgcgcctgtgctagtttcaaataagattgacgcactttttgatggaatgctaatttttcctgatccaagcggtcatattgattttgacgatgctgcttaatccgggctaacccgacttcagaaggcacatctaagtataacgttaaatctggcgtgaggccgtcagtagcaaataaattcatttgcgccactgcctcttccccaatcccgcgcccagcaccttgataagcaattgaactatccacaaaccgatcacagatcacgagtttatcggttgcaagtgccggttgaatcttttcaacaatatgttgtcttctagctgctgcgtataataatgcttctgttcgatcatccatcgccgtattcttaacatccaggataatctggcggatctgttcagaaattggattgccccctggttcacgtgtcacgacgatttcttgggacacttctttttgtaagcgtgccacgactgcttcgagtgcactggtcttaccggcaccatctggcccttcgaacgtaattaatttgcctaccacacaacaaccttcttcatcaatagagttactcttattttacttgattgagcaaacaaggtaaagggaaggggttaaaagttcgctaataaaaagactgggccttgataaaatcacttttatcaagggtccaatctttttttggttatcttaaagcattacggctggctacttcacgcgaaacggcatcactggccaccttgcgctgacgtgcttgtcggtataaaaattcgaactttgcttgttgaatcttactttccatctccaacgtttgatctagtcctctaacgtttgcttgcgttttttgtgctgagcgccacttatctttcacttgataaatcaaatcaagtaacgcttcatcgccagcttctcttagcgttggttttcgtctaccgaacattataaccccaccatttctagatttcttgacgaccctcgacagcttttaataaagtcatctcatccgcatattcaatatcgctcccgaccgctaaaccatgggctaagcgagtgactttaatcccggccggcttaattagccgtgaaatatacatcgccgttgcttccccttctggcgttgcattggtggcgatgatgacttctttagctggtgttttttggagtcgtttaattaaattagcaatattaatatcgtctggccctttaccttcaattggtgacaacaccccgtgcaagacgtgatagagaccgtgataatcgttcatccgttccatcgacatcacatctttaggttgttcgaccaccaaaatcatttcctgactacgcgcggtatcccgacaaatctcacaaggatcttcatcagtgatattgccacagacactacaataatggaggtctcggcgtgctgaaatcagattcttggcaaagttagtcacgtcatcttcattcatatcaatcgtataaaaagctaatcgcgttgctgttttgttaccaatgcctggtaacttcatataactttcgatcaacttcgcaattggttctggatattgcatatgtgcacttccttattcggttaccttagaatgggaggccctttgtgaacttgcccattttagcttgtgtttgtttatcgatatcaaccattgcttcgttaactgccatgatgattaaatcttgaagcatatcaatgtcatctggatcaacagcttctggtttgatggcgatatctttcatcttcttgtcaccagtcatggtcacaacaacagcatcgttagcagccttaccaacgaattcagtgctgtttaattcgtcttgtgtttgacccatttctttttgcattttttgcatttgtttcatcataccttgcatattacccattccgcgcattttaaaacatcctctcaatttttaaattaatctttttgaacaacgactgcatccccgaataacgcttgggcctgctgcacaacttcgctaacttcaggcgccggtgctttttcggtagtcgtcgttggttggtcctcattattatgacctgaaaccgcatgattttgcaaatattctttccggatttctggccaattatcttgcggtactaagaccactttaaacggattgcccgttaaccggtttaagccgttttctaggaccgtcaataaatcctgatcgttattagcccgttcgaataaaatttcgtagttaaaagcgacaacgacgccactttgactcgctgctaccggttcagaaacccgcataatcgctcgtttggtaacatctaacatatttaataaatctggccaaacttcttttaagttttctaaattagtccgcgtcgcatccgcaagtaccggataaatcaacttgcggttgaccttcttactaattttcttagctggtttaggttttgcttgttgaacaggcgcacttggtccggccgtttctaatttctgtaaggcagcttgtaattgagcaacttgttgacttaattgggtcacttgctcattatcggctgggtctgaaacattggcgctaacggccgcaggtgccactggttgttgcgtcaaacgcaccgttgcaacttccaaatagatttctggatgattagtgaaccgtagttgttgttgcgtttcatttaaaatgtcgatcaccgtatacaattgttcagcactcaaagcaccactaagttgtttaaagtgttcgtccaatagatccatttcgttagccattaccaattcaggtgcttgttggtacatcaataaatcacgtacatattcaattagatcttcaacaaaccgttgtgcgtctttaccctcagctaatatctgttgcaatagttgcaacgctgctttaggcgcgtaatcatgaattgtttgcacataatcggctaataaagcttccgtcaaactaccggtcacatccaacgcgttttctaaagtgacgtggttatcactaaaggataagacctgatccaagatactcagtgcatcccgcatcccaccttcagcggctttagcaatcacttttaacgcagctggatcgtaggtcatttctttttgttctaagatgtaagccattcgtttgaataaatcagcagccgtaatccgcttgaagttaaagcgttgggtccgcgaaataatcgtggctggcaccttgtgaacttcggtcgttgctaaaatgaagaccacgttggctggtggttcttccaatgttttcaacagcgcattaaacgcaccggtggataacatgtggacttcatcaataatataaattttataatcggcttgggttggggcatacttcgctttatcccgaatatcccgaatttcttcaaccccgttatttgaagccgcatcaatttcaatcacatcatttaacgcaccggcagtaattgcccgacacgtttcacattcattacaaggttcaccatctttttgataatgacaattaatcgccttggcaaaaatcttcgcagcggacgttttcccagtcccccgcggccccgtaaataaataggcatgactcgtctgttttgtaatgatggcgttttttaatgtttgggtcattgtttcttgcccaacgacatcatcgaaccgttgtggccgccaaacccgatataaagcttgatagctcatttaatgacctccgcctttcacctaatcgtcctattgtttaaaaaaactacttgttccattttagcatattttacagtattttttagggcctaagggcactaaaaaagagactgctccaaaaataattttagcttcagtctccctgcatcttctgaatcaacgtgctttttcaggcatattgttacggttagcggcgccgcgcaaacaatcgacctcgtcgcttattcacgcgacgaggctaatcctatacaacatgaccacctgaaacacactaggcactaaaaaaggattaagtcatattgacctaatcctggttaatttctaaaaaacttaagacacatgataaaacaaacttagtgctgctttcttccgaacctgacacgattcgtaggctcatcattgtctcaaggccttacggcaattcttattctacctgattaggtttaaaattaccagtttttttcttcttttttcgtcgattttcccgaatttttttgaaaaaggtctgtaataaggcggcacattcagcttcgcgcacaccaaccaccactgtcgcttggtgattaaaccgtttgtccgtcaaaagattcatcaaggtaccggtcacgccggcttttggatcgctggcgccaaaataaacgtttggaatccgactgttgataatggcccctgcacacatcggacagggttctaacgttacaaaaatcgccgtgtcttctaagcgccaactcttttcaaccatacaagcttcttgaatcgcgatgatctccgcgtgtaacgttgcatcctgtgcgtgttcacgaatgttgtgcccccgaccaataatctggccatccttcacgatgaccgccccaatcggtacttcaccaataatccgtgcctgattcgcttcatcaattgcaacttgcatccactgatcaatctcagtttgtgtatatcccaattcactaacccctttaccaatcaaaagagtgtccctaaaacaaaagacatctttgtcctagaaacactcttagtcgttttttatagccgttctttgactttcgtcgcataagccgtcaacgtttgccgtaaatcttccatcatttctggaatattatcggtttgttcgcctagcttatcctttaattggttgagcttatcagccgcccctaataaattattcacgtctgcatcggaaagttgatcaaccaattccaatgccttttgattaccatgtagtttatctttgacaaagtttttaactgccgagcgtttacggtagcgttcaactttctcgatgattgccttagaaccaacgaaagcggctgttgcaccgacccccgctgtgacaccaacaccaattagaatcttatatctcattttcattgtatcaacctccttacactatagccctattttagcatatcccagcctgtttgacgtcttatcggctcaacattattttaacttaatactttgtaaaatatagtagcctttatccttatgaatgatttgtacattgccaaaagtatccgccattaattgcttagctgaaggtgcaccttgcttcttttgaatcacgacgtctaattcaccatctgttagcaagtggtcgtaggcacccttcaaaatattttgaacaactgctttgccagctcgaattggtgggttcgtcaaaatcgcagcgtattgcgccgtcacattttgatattcagctgattcaaagattgcaacattttggatttgattcaaatcgcagtttttttgtgctaagccaagcgcgcgttcgttaacatcgaccatgtcgatttgacgctcaggtgctaacttagcaagtgtcatcccgattgggccgtaaccacaacccatgtctaagatgggacctgctggcgtctcgcttaaatcaacggcatctagcaatgcccgtgaaccgtaatccacagtatttttggaaaacacaccattgtcagtcgtgaacttgaaattaaagccccgtagttcaaacgtccaatttttctcagcgtgttcaacttccggattttttgaataataataatctgtcatttaagaacctcatttgtcttgattgttagttaagttgccgatttgaacaaaacgcataaaatgacctgcgagtccttttcgttgtggtgtctccgtcactttttggttcaccactaatagaatttggagcatcgtaaagataattgaggtccgcttttgataagcaatgtatttaggaatccacttcgtcgtatatttcttcttatacgtccgtaagccttggaagccgtagaagtgatagccatattcataaatcaaatgcgcgattttttcttcaataaaactgaattctgacgtccccacattggccagtggcgccatccctaaattgaagtactcataaccttctgctttgttgtgttcaaaaagactaatgaaaacttcatccattataccagatggcgcgtcttttctgtggcgcatgaggtcaatacttgaaacttctttcgtcccagttggcatatcattggcaaaagccacaatccgatgctctggatcataaatcacagcgatggctgcctgttgtaaataattaggatcgaagaagcccagtgaaaagcctttttcaacccgcccatcaagccaatcatccgaaacggccttcaattcagccattaagtcatctgaaaatggtggcgtcaataattcaaactgataaccttcacgttcaaatttattcatcaaggcccgctcagcacggcgcttcttaccaactaacgtaaagtcagccaacttcacgtacccttcttcaccaaacttgatgaaatcaaacccaatttcatgtaattgcatcgttaactcagccgagatttcatagaacgccaaatgacaatcaatcaaatcggcttcgcgcatcaatgcttcaatcgcatctataaacttgtctggatttccgactggttcgcccatcacaataaagcgatccgctttttttcggaataacaagaagacttgatcttcgccatcttcttgatagaagtaaactgatttgtcttttagataagccaaatgactaacttcattgccgccgtattccgcaatcaccttgctaattcgcgcttcatcaaatggtgttgcgatcttatgcccaccacgacttagatagcggaaaacgatgaacaacgttgccgctgccactaacaagccaacaaacccgacaagccaaattcgttccgacgggaataataacgccgttggtactggtttacggtgatgcaagtgtggtgagttcgcgattccgacaaaactatatagcaagaagacgccgacaaaaatggcgccatcgacgattcgatcattccatgagaattcaatcttttcacgataaagttcccgtttcaataagaggctagctaataagacaaggatcaagaaaacagccaacttaatcgagaagtcacgccatagggtattggcaatcgcaatcaccaataaaatcatcaatggccaataaacccgttttacccggttagcaaccccgcgtgctaaccctagcatgacaaaggccacgataatattcgtcacccggtctaggaaaaagaacgtgtaaggataaagttgaccgatcacggtattggtaatcgcaaagtttggcacagtcgctactaatagtaaaataatccccgaaatatagaggaaaaagacgataaagtggtgcgcgattttttgcataatctgccgtggtaggccttgaaggtagtgatttaagcgactacccgcatcgtgggtaaataagccaacccccaccaagaatggcatgatgtagtagaatacccggtagaatgataaccaaacaactgcatcagcattaccaacgccaattgcactcaacccaaagatcatgaataaatcaaacgtccctaacccaccaggcaccatcgaaatgaccccaatgatgttggcaatcatgaataatggtaggacttgtaataagtcacctttgatttccaagaaataaccgatcagcaagaagaagccaccagcaaaaccccattcaaagaatgagcctgccgttaagcgcaaaatccgtttaacggataaatcactaaaaaatgccgcgttcttcagacgggtacttccgagtaatactgggaaataacaagccccgccgactaaccataaccagtagttggcataaatttgaccaatgccaaagccaaagattaagacgatgctaattaaacaccaaatcgaaagacccgctaataaaaagagtgcaatctttgaaattgcaattaagatttctttttgcgaagcttttttaccgtagaagttagcccgtaaactagcacctaaaaagccgccaaagccggcgatattcgtaaatgtattaacaatccagcctgatttgaccttataccaaaacgaatactcttctggtaacaactccgcaatgacaaagtcataattgagcattggtaatatcgctaaaaaaccaattacgagcatcgctagtaacgttaacggactctgcgtggtcaaacttgcgcgtaattgttctccgttgagatctcgaaaaatacgaccgacttcaaagatcacaaatactaagactgataagataaagaggccttttaatagtgttaaatggcgctggattccttgataaatgcgtctacccaaatttttcattttagtctcctcttgataatgagataccttaattataagctatccaacagaaaaactcagcaaaatgacaattatgttagttacacctaacgcacattaatccgtaaagcactcataatgactaacgtctgggcagagctaacggttgcgccacgcaataaatcgagtgagaagaccgctttttcaaacgtattgtgactcaaatcaaatgcttttaaattagtccccgtcaaatcaatcccgttcaaatcattaccgctcatcgtcaaccactgccagtcgacatattcaaacgccacttcttgtagcgagcattcttcaaaatccacatgtcggattcgtgtttggttgaaccccgcataatccaatttgcaagcgccaaagcggacatcccgcaaaccagcttcggcaaaatcagccccgactaactggcagccttcaaaagccactcgctgaaaagtattgccgataaacgaacagtttaataacgcgcaatgctcaaaaaaaacgtcttgaaaatcacaattatcaaacgtcacctgttcaaattgcacatttttaaagtggctgcccttgaaataggccatattaattgtgacttcttttaacggcatctcagtaattaactgattttcataggcttcatccgtttcaaaatatgcttcctggtagggacttaaagtcgccattaaaatcggtgcttgtgctttttttactgtcatcatcatttctcctctaattaaaaaagatcggcagtcaaacttggttgccaatcttttttacttactattttgtataacgattgcccaggtaataatcggcaaccttcattgtttgatcaacacgaccacggccggttgcataatcgaactgcatctttggctcaacattccaaacataggcgttaaaattcaatgtcttatctgttgaaattgcttgtacccaataaccacgtggcatcaattctgatccgcggaaaacagtcgtcacttgatagattacttttttatgccgaattaaagcttggcgaacctgatcttcaaaaatctgcatcgtccgctggttactgaattcggtttgggtggctaaattcttaggattgtcactactgcccaattgtcccttcttaaaaacgccatcttcatcgaagttaaaagatattgcataggcaatcagatgaccacgattctgaggtattactcggtggccatcaatcatcacgggctggttatgccagccggttggccgccaattttgccgttcacgtgtattggaacgtcccaacgtatcatgtgataaataagctgtattggttgtcgtccgattcaaatcgtctaacgccccatatttaatccgttcggtttgccattggcgcacatctaatgtggatttgttgtggttaacaaccagatatggtttgtcaccacttttaaacgtcttatccgctaaagtcgtcgttgttttggtttgcttgtgagttgtcgttgtttgtgctgttttatgagtggttgtttgttcagcctgacagcccgctaatacaagtgctaatagcgcaacaacgccaatgaatcgttttttaaacatcctgtgactccttttctaaggtttgtttagctgcccgtcgtttcaattgttgcatcgttttgaaatatgagctcaataggactaagcatgagccaatccaggcaagcgggttcgccatgctggcaccggtgaagcccaacatacggactaagataatcccggcaaaaatccgcataaataattctgcaatccccgccaatgttgggataaaactttgccccagaccttgtaaggtatagcgaatcgcaaataaaatcgctaagataaagtaactactactattaaagcggaagtagatttgggctaaggcggtcacgtgtggttgttgatcaccaatgaagaggttaaccaatggtcgaccaaagatgataattagcgcccccatcaccaaactaaaaataatcgagaccgttaatgtttgacggacccctttactaattcggccgtattcacgcgcgccatagttttgggccgcgtaagtagccaaagcaatcccaaacgagtttccgacttgcgttgctaattgatcaatcttaccggctgcggtataagctgcgacagcactggcccccaatgtattaagcataatttgtaagacgattgagccaatcgcaataattgatgattggaaccccattggtaagccgaccttcaaatggtccgtaatatcttttttagtgatcttaaaatccttacgccgcaacacaaggattggaatgcgccgatagatgtacactaaacataaaatagcggcgatgatttgtgccgaaaccgtcgcataaccggcgccttcaacccccatgtgtagtcccaagataaaaatgaagtcaaataagatattgacgattaccccgatcacaaggaaaaataacggtgtccgactatcacccagtgcacgaatgatgttagacaacaggttaaaggccatcgaagcaaaaatccccgcaaaaataatcgtgataaatttctgcgcatcaacgataatactagccggcgtcttcataatcaccagaatatgacgcgcgaagataacgctgataaccgttaaaatcagtgtaatcaccgcactgattacgatactcgttgcaaagctgcgcttcacacccttataatcctgggcgccataacgctgtgccgtcatgatagacagccccgcagtcgtcccagtacaaaagccaataattaacatgtttaaaccgccggtagagcccactgctgccaacgcattgaccccaattgtccgacctacgattagcgtgtcaataacactatacagttgctggaagatgttcccaatcaataatggtcccgtaaacattataattaacttcagcgggttaccttttgttaaatcatgcatatgtactttcctccctatttgttactctttaggttacttgaaaatcaataaaatacaaggggttgattgcttgaattttaaaaagattcaaaatacaagtatgcactaaaaagaaccaagtcagcatgcccgacttggttccaaataaatgatttagttgaaataattaatccccattgcatcacgtacttctttaagagtttgttctgcaactgcgttagccttcttgctaccttcttctagcatcttgtaaacggcttctggattcttttcgaattcagcacgacgttcacgaattggtgcgaatttagcttgcaagacttcgtttaagtaacgtttgattttcacgtcacccaaaccaccagcttgatattgcgctttgagttcagccactttttcatggtcgtcatcaaaagcatctaaataagtaaagactgtgttgccttcaatgtgaccaggatcggttactttgatgtgcaatggatcagtgtacattgacatgactttcttttcaagcgtttcagcgtcatctgataggtagatggcgttgcccaatgacttactcatcttggcattcccgtctaaaccaggtaaacgaccttcgccttttggtgggaagacaccttctggttcaactaaaatttcttggccgtaaacgttgttgaaggtccggacgatttcacgtgtttgttccaacattggttcttgatcatcgccaaccggaacggtcgttgctttgaacgctgtaatatcagcagcttggctaacagggtaaattaagaaaccagcgggaatactttgttcaaaattcttttgttgaatttcagctttaacggttgggttgcgttgtaaccgcgaaaccgttacaaggttcaagtaatgcattgttaattcacttaaagctggaatttgtgattggacaaaaacggttgttttagcaggatcgatccccactgataaataatctaaagccacttggaagaggctattgcggattttttcgggatcgcgcgcattatctgttaacgcttgttgatccgcaatcataataaatgtttcgtattcacctgaatcttgcatcgcaacgcggttccgtaatgaaccgatgtaatgcccgatgtgtagtttaccagttggtcgatcgccggttaagataattttttttgccataataatatcctccaatttttacttatcaactaaaaaaagcgtcctaattgttgttcacaattaggacgcttagacgtggtaccacctaaattgcacgaaaaaatcgtgccacttatgcgataagggcgctacccgaactggcttatcaccagctcccgattaaaggcccattcacaacttgcttttgacgacttctcagtaccgtcgcttcctgtgcaaaaagttaaagttgctacttatccttcactctgtttgttgaattactgtcatactaacggattttaaaatgaatgtcaaacggtcgcttttttccattaacacgactataatataacaactaacatctggaggtcgccatgctacaagaagatacgcaacaacaagaacaagcccgtgttgatttaacggttgaccaagtcaatcaacggctaacagttatcaaccaacaattggccaacgcctataatgaaactaaagatattgaacaacgttatggtgatactaccaaggtcaatattacggaagtcgatgaccggatggaaaccaatgccgctgtccaacagcaaaaacaactagtcgcagctgccgttgaaaacgaaaagctcctaacgtcacaacaaaaacgactaacggatttagtcgactctccctattttggtcggattgatatcaatgaagacggtgaagaagagtcgctctacatcggaaccgccacttttatcaatgaacaagaccaattcttggtctatgattggcgagcaccaatcgctagtatctattataacggcaccctgggaaccgtcagttacgatacgcccaacggtcccgttaaagttgacttaactttaaaacgacaatttaagattaaaaacggccagattgaacacctctttgatacaaatgaaacggttggcgacgaactcctgcaagccgtcctcggccaacaaagtgatgagtacatgcaaaatatcgttgcaacaattcaaaaagaacaaaatgatattatccgtgatacgactgccgatttactaattgtccaaggcgtcgctggtagtggtaagacttccgcggttttacaacggattgccttcttgctctatcacagtcgtagcaacttagaagccgaccaaatgattcttttttcacctaatcgcctattcagtcactatatttctgaggtgctccccagtttaggggaaaagaacatgcgtcaagtgacaatggccgagtttttaagccaccgtttctcgggacttcaagttgaaacactcttcgatcgttttgaaaaagaccaagcgagttttccagaaatgacgcaagcaatgcgccgctttaaagaaagtgcaccctttatgcaacaaattgcagcctacgttaaacaagtttctacacagccattggcttttaatgacctctactttgaagatcgtcctttcttcacaaaagcgcaaattaataaaatttatctcgatctcccacataatatgcgtcccggtgataaattcattgctactaaaaacacccttattaagcgtctcaaacgccaaattaatttagaggtgcatcttgattgggttgctgaaaaaattgataccttatcagatgatgactaccgcgccatcgtcggtgatcgcgaatttgattctggcgatttagaacaagcatttattgcccgggaaattgttcaaaattattttgctgatttatacgatgctatttataacgattactttttggatgtgtatactgaatatcaaaactttttacggacagcttgtccgactacaattccggttgccgtttgggaagcaatgattgaaacagtcgctcaaaataatgaacgccatctcgtcggtttaagtgacgcagcgccaattttgtatctccgtgatttattaaccgatagtggtcaaaatcacagtatccaatacttattcgtcgatgagatgcaagattatagcattgcgcaatttgtctatctccaacatgctttcccgaatgctaaattcaccgtacttggcgattacgcgcaagacgtctttaccgctacttatcaagccggtaatttcattgaacgcctcagtgcggcttttccaaaattgaaaactaaccaaattagtttgacaaagagctatcgcgcgactgcccccatcacgaattttgcaaaagccttattgcctaaagaaacagccttgcaagcctttagtcgtgatggacggctccctcgtgtcatcacaaccactaaggaatctagtttaaaccccttaacgcgagaaattttccacctacaaaaacggcatgcaactatcgccattttaaccaaggatcaacaaacggcacgccaacttttcgctagccttgcccctgatgatcaggtaacgctcatctccgagaccacccgctcattgccaaaaggcgtcttggtattaccgttatacctcgctaaagggctcgaattcgacgctgtcattggttacgatatttcagcaacaacctttggccaagcgagtgacgttgatttactctatacattgatgacacgtgcaatgcacgatttaaccttgttggggattggaaccctcagcccactcattactaatctagaccctcaatattatcaaaacgttataaccactaaggaaacgattgcctaatcgtttccttttttggtacaaaaaaagaccgttgcacattagcaacagtctttaattcaaatgattattaagctgtttatcggatttgaaccgacgacccccaccttaccatggtgatgctctacctactgagctaaaacagcataatcacggctaattgatgaccgtgatataagtatatcgaaaaataaaaagcgggtcaagtccctaaaggccaacttctgaatctgataatgataatttaaaatgttgttgtaaaaacttagcacccccgtcatccacattagtttccgccacataattagcgaccgctttgacttctggtaaagcatttcccatcgcaacactatacttggcggcttgcaacatcccaaggtcattttgaccatcaccaaaaacgaaggtatggtcagcatcaatcccatgcagtgtttgaatttggcgaatcgccgttgccttatcaatccccttaggaattaattcgatattatccggaccagatgatgataaactcatcacatcttgttcagcaagacgttgcttagctgaggccaatagtgccggtgcaccatggcaaacaatgatgccgttaataatctgatcactcattgccaacaagctgtctagatcagcaaccgagtcataatcaatttcagcccccatactggtgagattccccgcatcacgtgcgacaaaccgtggaatttcacgcgtataataagccgcatcggttgtaaaaaagtgggctgataaacggggatctgattgcgcgattccataagccgcttttaaggccgcgcgacctaagtgatgttgaacgcttccttgtgcattttcaaaaacagcaccattagaagcaataattttggcttcatcattaatttgtcgtgcaattactttaccgagattatacatgcggcctgtcgcaatataaaaaatcacatcacgctgctgtaaggttcgaataacccgtttggtaaatggcgttacaatttggtgatcaatcactaaagtcccatcaatatctgaaaaaactaagtaaggttccataataactcctttttggttatgtttgtaatcgctaacacaactctattttagcccatttactttaggaattaaatagcaattaacaattgtgtcgccgatttattttctttttgcttggttatagcttgctatttaaggtgacatagtttattatcaccttatttggtaattttattatgtctaaaggagtttttacgatggataaagaaaatctcaatatcggtgatattgtcactggtaaagtcaacgaagatctagagtcagcttttacaggaactgtcgaaaaggtatacgaaaactcagctttagtcacaattacggatttcgacgccgttgataaagctaacgtttcagaattaaacaacaagattgttgttaatcttaaacaattgaaagcctctaaaacaaaatagtatcaaaagagccgtttcaacaagcttaattgttgaaacggctctttttttattcattactttcaaaacgaccccataagttcattgtcgactgaatattaacaaatgcattcggatctgcatcttgaacgactaatttcagagccgttaaatcatatttagaaacgactgtcataatcacagacgtctcctgattcgtatataggcccgtcccatctaattcggtcgcaccatggataaattcgcgcatccgcttctttaatgcctctggctgctttgtaaaaatcgttactgtcaccttttgttgttgtgtgtaaatatagtccattaacaagctcgatacgaagatttcaacgatactatataaagcagcaccccaaccaaagaaaatgccagcagcgaggataatcatgccgttaatgacgttattcacaacgccgactcgtttacctgtcaatcgaccgacaagcgtcacaatgacatctgttcccccagttgaaaaaccagctctaaaacaaagaccaacaccaaggccaattaatgccccaccaaacagagcacccgcaaagcgttccgttagaatgggttgaactggtactggaatgatttttagaaaaatgacacttgtaaaaaccgcaacaatactgaaaattgcatattgatgattgattttaaaccatgccaatactaacagcggcacattcaggataaacactaaggccgccacactcaaagaaccaccaaggtatgacactagcgctgttaataattgtgcaacccccgtcacaccacttgaatacgtcttagcaggaatcaagaatagattcacactgaccgctgctaaaaagccatacaccattgcgattacaatccgcttggaactcatttttaaatcagtcattctcagcacctccatcaaaaaagtcacactccccccttggaagtgtgacaaattaattaaaagtccgattttcttaaagattcttatccattacaaaggtcaacttagacaattgtgtaccttctgtgactaactgtgctaacaaatcagttgttgcttcattataatgcgttgcaatctcatgattttgagctgtcaaaaaggctacggcgtcagtttgattttcaattgctttatcagttgcagcaatcttagttcttgcccattctgataatgccttttgataatcgatatcagcttgtttaaacgcaccataatgcgattcaacaatcattgctaatgcttcatgtaaccaataagcattctttaaggtcatcttttctggcaattcacgataagtttcatccgtatcatttgcattcgtaaagaaaggtacgtgagggcagaatgtcggtacaccaaaacctaaccattgaacacctttcaccgcatcaggcacattatttctaatctgacaaatatgggaattttgtgtccgtgaaagcgaaattgcacgataagtcgtcttttgttcttccgtcccattaccaagtggatcgtattctgtttcgttataatgtgattttaacacatattgaacatcttccacacttaatttgcggtttgctttccggataaatggtaaatcacttgattctggttcttgtttaatttctggattgagataacgttgtgcgtaccaaacacgtggtgtgttatagtgacggtctttttccgtatctgttccgaaaattttccggaaattccattctgtttcacttgggttcaagtgattttcactaacaaattcttgaatgccttctgaccacatgtagttatcagggtcattaaaatcaatattttcaatcgcaacttggtttgctgcaactgcgtaacagtcgtctggaatcttaacagctacccagtggtgacctgttacaatttcttgataccaaacttcattttcgtcactgtattgaacaccattaccttcggctgagccgtatttcgtaacgatatcgcccatcaatttaaccccttcacgtgctgagttaatgtatggtaatacgagtgaacacattgagtcttctgctaaaccattcttaatcaacggatcgtatgctaaaacccgttcgttagcgtagacactttccgttgcagaaagtgcgacgtttttttcgttaataccgtcttcttcattcaaaccatcacttaaatcaccattaggggtggaggtataacgataaccttcttctggtaatggcatggttaacccgttatatttagaaacatatgtttcatgccgattgtgcactgctggttgtacgaagaaacgtttagggtggatcgcataaaagcgatcttcattacgcgaaatcatcgtagagccatcaattgacgcattcttgcccaccatcattgaagtacatgcggataactcgattctgtctgtcatttgaaaaactccttcatctataagctattttaatcatgattcacaactttaattaactcaatccgtcacacgtttgattaaatgttcagtttgttctaaatgatttaaataaacgagtaatcgttcatatagatagtcgtttgtttcatcatattcggctgcgagtgcttggccaatctgataaacactccgctgaccattaacgtgtctaaatacgaaactaccataatcatccagcgtcaattttgattcagctggaattctgatgtgtaaccgtctaaagaatcgttgaatccaatgatcctgaggacgaataatagttacctgtcccgcttttaattgaaacttaacttctggtactttagcaaagattagttgatttaaatcaacttcagccttttgcttcctcatcttcgctatctcctccttttttgatcatcatcaatggtgctgcaatcgcaacaatcatgacaactaagagaatcaatgccatttcgttactgcttgcaaaacctgaaatcacgcggtcttttagaacacctgtgacatggaggataatcccgattaagccgataattgaaccaccagcgattaaacctgaagataaactaatcccactttggattcgattattcttaacagcttcatcaccagtaactttatcgataaacactttaattaaagcaccaattaaaatgattgatgttgttgaaattggtaagtaaaaaccaatcgcaacagtcataattggtaattctaagaagtataatacaatggccattgcaaccccaacgataatcataatccatggtaattcaccagacataatacctgatgttaacgttgcgattaagttagcttgtggcaaaccaaaagcaggtgttgcactgtctgtgacaaattgtggtgataagatactgattgtcccaataacaacaacaacaccgataaatgctgaaatcatgaagtatttcatcatttctgatttagaaccaccgataacataagttactttttgtgattgcatgtagccaccaccaacagcgattgctgtcacaacgaaagtcccaaacattaataagatttgtgtatgcgcattgcttgtccaaccgaataagacgaagacaaccgtcataatcactaatgaagcaattgtcatccctgatacaggtaagttagaacaaccaattgtaccggcaattcgagctgatacgataacaaataataaacttaagataacagctaatagtgcaccaacaatccccatcatgaagttttgggcaataataataccaattacaaagatcccaacagcaccaagtacaattgaaaccatgccaagtgtgtttttatcttcacctgttgtgtttttagcgtttaatgtcttcttgattgatgtgacaattgttgggattaatttaatggcaccaattaaaccaccacaaagcatcatcccagcaccaatatatttaacgtatgaacttgctaaatcgttaactgtcatttggttaacagctaagcttgcgttattccaaacatgagcgccgttgccagccatatcagtaaagtaaccgataagtggtgcaatggcaaagtttgataataaagcacccgcaaacattgttaatgcaacttctaacccaacgatgaacccaatcccagctagtaaggggttaacttcaacgtctaatttccatttataaaatgatgagccaacatagttcatcatgttgttaacaacaccaaaaacagaagttgttaacatcgtaataacgccaccgataccaaagccaattcccatatatttcaaagaatcgccaccagtatcagaagcaactaacgcttctgaaatcgccatggcttctggataaaccaagttaccatgttcttcaacaactaagtagttatgcactaatgaagatgtcccaattgaaaagagaattgctaaaatcccaacaattaacccttcgataaagttaatatgaccaccgattaaaacaatagctggtaaaacatagatcatcccactggcgattgattccccaccactggacatcccttgcatgatatttttacctaaaatcccttttgatttagcgaaagccccaactaaacctgaaccaataattgaacccggaatcccggccgcaacagttaaaccggccttcattcctgaataagctgtggaagctgcgaaaataatagctaataagctccccataattaaaatggctgtattaccgactttcttattaccttggctgacatacgggacatacttttctcccgaaacgccaccgtatgctgattttgaaagcttcttttgcatcgaatttcctcctaaaatagcaaagctatttatttatcaatactcatatcttgaccaaaaatttgcattttaagcgcaatcccagttggtgttgccgctaggccccctaagcccgtttctcttagcgttgaaggtaggttttcaccaatactcttcattgcactaatgacttcatcggctggaatcttacttactaaaccagcaagtgccatatcagcacttgttaaagcgttgacggacccaatcacattccgtttaacgcaaggtacttcaactaaccctgcaacgggatcacaaaccaagcctaataaattagacatagccattgcaaaagcttctgaagattgttgtggtgttccaccagctgcttcgactgctgcggccgcacccattgctgaggcacttccgacttctgcttgacaaccacccgttgcaccagcaatcatggcatcgttagcaacgaccatcccaaaagctgacgcgcaaaataagaaacgaatttgcgcatcacggtctagtgataactgtttcgtaattactgataaaatacctggtaaagtaccagcagaacctgccgttggtgttgcacaaataatccccatggacgcattgacttcatttgtcgcaatggcattttgaacagcttccaacatgatatcgcctgatagtgattgccctttttcacgataccgtttcatcaaaacggcttcaccaccggtaattccagttgctgactgaacgccttcaccggttacccctttttcttcagcagcaagcatcacatctaagtttttgcccatcgttgcccagataatttctcgactagaatggctcatctggatttcttgctcaataattaattccgaaataggtaactgccgttcttgcgctgtttgaactaattcatgaatttttgtgtacatcacatttcaccgccttctataatacaatcatatctttactcataccacgaacctgttcaacctgttctggataaggcttatcaagtaattctaatttatacaagaaccgacctggtacacgaaccgaaatccgagcaccccgataattatccttgaagatgtggtccaaagctgtcccaatttcttgatcagattcgacgaaaataatgggtagtgggccatctggttggaagataatgccgtttaaatcgaccttccgaatttcgatcgtcccaccgccaattgaacaaccccaaatcgttaatgatttttgcgaattaataagtgttaattcagcagtattcggatgattgactggactgtcaccagggtcttcaataaattcgacttcaatcccttggcgtcgtgctaaatcaaccgccattggtacccgttgatccgcgggatcgaatcccaaaacgccactaataatggcataatcggttccatgtccttggtgtgtctgtgcaaaagattcataatagcgcacaatcacctttttaattggcgcatgaaaaagtcgattggcaacgtgtccgatagcaactgcacctgcagtatgtgaactagaaggcccaatcataatcggtccaataatatcaaaaacactacgatattggtttgtcattctaaacgcctctcctcaagaaaaattaaataacagcttgttagattaggttattgtaaaatacatcacaatccttatacctgtaccataacacaaattgaataacagttcattatattacaataagcatatttctgtgattatgagaaggttattaaatggttggcaagcttcaccatgttaattatataaaaaggtttatttaacgtctatgcatcgtctatatttcttatttaaatctcataaatgtcattagaaaaaacggtttataattgttttactaattgtgctataacacggaccttttactttgcacttactaataataactactataatgaatcttaagataatcagtaaaggagtctctattatgaaaatatttgttattggtgcccatggtaacattggtcaattactaatccccaaactcgttgcagcaggtcacaacgtctctgcaggtattcgcaatgatgcacaagcatctgaaatgacagcattaggtgcgacacccgtttcatttgacttaacgaaacaaccaaaagaattagcacctctttttgctgaccatgacgccatcgtctttaccgctggttctggtggtaaaactggcgacgaccaaacgctactagtcgatttagacggtgctgttagaagtatggcagctgctaaaatcgccgatgttaagcgctatgtaatggtcagtgccctctttgttgaagaacgtgcaaaatggccagaaagcatcaagccttattatgccgctaaatactatgctgatcactggcttgaattctctggtttggactggactatcctcagacccggcacattaaccaatgatgccggtacagcgcaattcactatgcaaccaactggcgggaaagttgcccgtgctgatgttgcagcaatgattcaagccgttcttgaaaatccagcccaaacaattcaccacaagtattcatttgtaaatggtgacttaccaatccaacaagcaattgaacaagcagattaaaaaagtggaccatcaatattcgagtattaaaaaagggtctgagacaaaatttacttttgtcccagaccttttttaatacttgctttaagcgtcactttttttcttagtcgttgtcttcttagcggctgtctttttagttgttgttttctttgttgctggtttcttcttggtggttgtcgcctttttcttagtggttgtttttttagccgccgttttcttcttaggtgttgcttttttcttagcaggggccttagaggcttcaactggcgcttctttggctaacttagcgcctgcttcaacagcttctagatcctgtgttaatagttgttcgactttggcccatgcttgatcagcttgtgcttcaaagtcaacaacagttccaatgagatcaatccgcattccagagcggttcactagtggtgacgtcacatagagatagatattcacttctgcttgtgcttctaattctaaaaattggttaacctttttgatgtattgtaatggtaaattcacaacgccagtttctagcgtcaccttcacttgttcgccttcataagtggtcaacgctgaaaaagaagccaatgcttgtttttcaacagccttactgacagcgggtttcaactgtgccaaaaagtcagctgccacaaatgggttgggtgttgctatttcatattcatctgttaaataagtttgatcttgaatttcattaataaatgcttgtacgccgattttcatttcatcagtccttttttgatgttctacctagcatagcttattttgatctaaaacacaaaaaacatcccacagaacgtgagatgttttaatttttaagtgtttagaagacacgtttagcaaagcttggtgtgtaatattgcattgaaccaattttaacattttcaccaggttgtggtgcgtggacgtattgaccaccaccgatatataaagcaacgtggtatgagctgccttgtgcaccccagaataataagtcaccaggttgtaaactgcttaatgaaacagaataaccggcactttcttgaggaactgtccagccaccgatactccgaccggctgcattttggaagacatagtccatcaaaccagaacaatcaaagctacttgggccatgagcaccccaaacgtaaggtttaccaatttgagccattgctaaattgataacagcttgtgcattaccagttgttggtgctggtgttgcaggttttggtgttgtaggcgctggtgtaggtgttgtttgtgttggcgttgttggtttagtactttcaacaacagctggtttgctttcggcaacagacgattgttgtgctggtgctttaggtgttgtttgttgtgtactactttcaacaactggtgttgaaggtgtcgttgatgaaacagtcgcagattctgcttgaattggtgtcgcttgtggtgctgattcaaccgtttctttagcaggtacttctacggctgttgcagatgagctttgcgctggtgcaactgaactttcaacagctgatgctgttgattcagatgtcacactactttcagcaactggcgctggtgattctgatgatacgctactactttcaacgacagatgatgaggctgctggcgctgaaatagattcagcttggctttctgatgcaacaggagctgctgttgattctgagacaggtgtacttgaagcaacactttctgaaactgatgatgaggcaactggcgctggtgttgctgcttgtttaacaacaggtgtgctcttcaattggccttcacctgtaaaacgagcaggaacccaaccgccattagctaattggtaccattcttcacctgagacagtttgtgtttttacaacgccttcagtttgaccgtaagtcatataacggccagtaggttgtgtataagttggtgttgcccagacagttgttgcaccatccgcaaaagcaacacgaatcgttttagcagcatctgtttgtgccttaggggtttccttagcggccgtcaaatagcgttctggcacccattcgccgttaccaatccgataccaagtttcagcacctactttttgtgaagcgagtagattaactgattgccctttaaaaatgtatcgtttagctgtttggccggtttcaggacttgtccaaactgtcgttgcaccagctgagtaattgactgttgcggttgcggcgttggcttgacttgcactgagtaaactaatcccagcaactcctaagatacctgaaccaagtgcaattaaactcttcgtgttgttcattaacttatctcctaatcgtgattttatatttggcattttttaatattcgtaagtaaatcctaaatatctttaaaaaaaaataatttctaaaagcaatcttagcacaatttagccccattaatcaagtttgcacgctttcacccttttttagaaagtactaaaaaagggacaacaaaatttaatttgtcatccctttttcttaaatcacctaatgagccacgtttccggcaacatttaatgcatcccaagttcttgcaaatggcggtgcgtagacgaggtctaacagtcccaattgctcagttgtcatttgcgcttgaatggcagttgcaagtacatcaacccgcaaaactgcatccttttgcccaataatttgaccaccaattaaaacatgatctgcttttttataaactaatttaatcgtcagttctgattgtcctggataataatcggtatgattcttatcgtggatcaaaacagtatcataatcaatgccagctgcttgtgcttcggcagaagttaatcctgtccgtccagcttcaagggtcactaacttgaccccggctgaatttagcatccctggtaattgcgcttgttgccccgctaaattaacgcccacaacgcggcctaacttattggccccagttgccaaagcagaatacattggctcaccggtcacactgttaatcacagtggcgttatcgcctgctgcgaaaacattttcgattgatgtccgccctgtttgatcgacgacaatcgcaccatttttaagttttttaagccgatcatccgtgataaattgcgtattggggcgaatgccagctgcgacaacgactaagtctgttgcatagcgacctttatcagttacaacgcccgttaccttcgattgcccttcaaatgactgaacggcttctgataattgtaattcgatcccattatcgcgtaaatcagcggccatcatatccgttaattctgaatcaaatgcaagtggcaagacgcgatcttctaattgaataacccgtactttcttacctaattgatggaactcttcagcaatttctaagccaataaagccagcaccaatcaccgttacagattgaatttcaggcgtttgacctaactgacggagcacttcaccatcagccaacgtccgtaaatgataaatattatccaactgaccattttcaaacggtggcatgactgcggttgccccagtcgctaacattaattgatcgtaatgttctgttttggcctgctttgtttttaaatcacgaacagtaatcatctgtgtatcgaaatcaaccgcaacgacttcatgttctaattgcacgtcgatgccttgtttagcaaaggcttcaggcgttctagcaatcatttggttgggattatcaaaatgctcgccaacaaagtatggtaagccacacgcaccaaaggagacgtaatcccgcatttcatacattactacttctaattctgggttcattcgtttagccttagcagccgcactcgtgccagctgctgttgcacctacaataatagttcgcattattatccctccgatttaaaattaagcaatgtcgtcagaatcttctgttaacgtcatgtcattaaacttatgtttatctaatttacctaagaattgtgccgtcaataccccaacagtcattgagccattaacattcaatgctgtccgacccatatcgattaatggttcgattgagattaaaagaccggctaatccaactggtaagttcattgaagaaagaacgattaaagcggcaaatgttgcgccaccaccgacaccggcaaccccaaatgaactgatagccacgattaagattaatttaaccaagaagccgatgctccaaggattaatcccaaccgttggtgcaatcataacagctaacatcgctgggtaaacaccagcacagccgttttgaccaattgaagccccaaatgaagctgataagttggcgatgccttcttcgacccctaaacgttttgtttgggtttcaatattcattggaattgagcccgcacttgtccgtgatgtaaaggcaaagattaaggttggaataacctttttaatgtaattaattgggtttaagcccgtaaatgtaatcaataggaaatgaacgataaacatgataattaaagcaacgtacgaggcaatcacgaacttccctaagttcaagataccttggacatctgtttgggccaccgtcgttgtcattaatgctaaaaccccgtacggtgtcattctcaagattaaggttaccattcgcatgataacggcgtaaaaggcattgacgattttattaaacgtctctgcttgttctggtttcttccgtcgtaattgtaaggctgctaagcctaagaaggctgagaaaataacaacccctaatgttgacgttggtcgtgcaccagtcatatccataaatggattttctggaatgaagctgacaatcttttcagggacggtttgttcttggacatcccctaattttgtttctaattcttttgaacgtgccttttcaacttgtcctgattgaattgaactggcatttaaatcaaacacgtttgacgttactgaaccgacagttgcagcaattaacgttgtgaaaactaataaaccaataaccattccggccattttacctaagcccttagaagattccaagttggtaatagcttgaatgattgaaaccatgactaacggcatcacgatcatcttcaagaatgatacataaccattcccgacaatcccaatccaatcggccgtttgtttcactacttctgagtcggttttaaaaattaattgtaaaatagcaccaaacaaaataccgacacctaatgccgtgaaaacccgtcgactgaatttaacgtgaatccgcgccatcttatttagaacgaataacatgatcaacataatgataatattgatcacaatatatgtaatagtcatctctatccctcatttcctttttcaatacttacttattgtaaacgaaaaccactttttttgcattaagtaagcccctaatttcggaaataattcgtaaaaagccattaaatcggattataactttcaatttttaaactaaaatttacagaaaacccgatttagaccacaaaaaaagacctttcctaaaaggaaagatctttctcgacagtattccgaagaataaacaccatgtgctccacaacacagcgggcgaaaacacccttacaatacggtaagtgattaaattaataatcgtggtatcctgtatctttgggtctcctagctgctttcgcagaatagttgcctaccgagacttactcgactcatcgcataacaatagtataacatactttttagtgtcttgaaagccaaattggcacactacttctttttctcgtaatatcggctagaatttgtgcaaacataaagccaactgcaatggcaccggccaccataataactgaaatactctgtgtcacagcttgtgagatattccctaaaacaaggttgcgcaccgctcggtaagctgttcctccaggcactaatggcaccaaacctgggatattaaaaataatcacgggcatccgtttgtagcgggccaaaatactcccgacaattccgacggctaacgcaccaaataaattggccatcatccgaccactaccaagattgaacaatacccaataaacttgccaaccgagcatgccagcaatcccacaccagactaatgcccggcgcggtaaattaatacagattccaaaggcgaccgttgaaaaataactaaagaccgcttggacaataaactgtagccaatatggcatacgtcacaccaccttcattaaattaaaaatctaaagattaacgcaatcccagtcccaatcgcaaacgcacttaaaagtgcctcaacaccccgaaccattccggataataaatgcccagctaacatatcacgaattgagttagtaattgccacaccaggcacaagtggcatcacggccccgataataatattatcaagatcgacacctaggtgccacttcgttaataagtaagctgacaccccaattgaaacggctcctaaaaactcgccgataaaccgaatgctagtcaagcggttaatttcagagaaaacggcgtaccctaacgcccccactaaagctgctggtaataaatcagcccagtcatattcaccagaaaaaatgatcattaataacgccgacacaaaggccgccgcaataatctggatccataaaggaaaatacggcgtgtgttgatcaatttgtttcaagcgggtactcagctgatctaacgtaatttctttggtcgcaaattgtcgcgaagccgtattaacattttcaactttttctaagttaatcgtacgcaccgcaactgattccagttgcacatacggttgattttcgatcccgataaataagccagtcggtgtcgtgaagaccacactcttttgaataccggcattataagcaattcgattcatcgtatcttcaacccggtacatttcagaaccactttcgatcatgatgcgccccgcaattaagcaggtttctagaattttatttttttgtgcaattttcatacaaaccctcactcaattcttttctcaatatctccatcataacttgtttaaacttaaatagaaacaataaatctgattaaaaattgctcatagagcccctcattcttccccatctatgttaatctaataaggaagcaacatttatagcacctattcgaatacgtactgcgagagctacgtttatgacgggctatttttttggacttttttccagcttatctaggagggttttcatgcattattcaaaatcaaggatcatctggctatccgttctactcggctctttgagcgcttatggtccattattagtcgatatgtatttaccggcatttccaattatggagtctgattttcatacttccgcttccatgattcagatcagtttaacaatgtgtttagccggtttggcgattggccccattttcatgggtgcctggagtgatcgcgtcggtcgtaaaacgccgttggtgattgggacatcactagccattatcgcttgtttcttatcgcttgttacacataatatctggttattctttttactcagatttatccaaggacttgcaagttctgctggccaagttgtcacccgggccgttgccaaagatctctttaacggcaaacaactaactaagtttatcgcattattgatgaccattaacgggattttcccaattatttcaccattaattggtagtctactattacggtatacttcctggcaaggtatcttcggtttcatcggttgtaccggcctgctcttattactcggtttaattttcggatttaaagaaacgcacaagttatccccagccgatcaaaaggcaaccagtacccgactcaatgttcaaacagtctttaaagaccgtccttttatctgtttcgtacttatccaagggctcgtctacggtgcaatgttctgttatatttctggctctagttttatgttacaaaacgtcttttcactttcgaagtcaacttttagtctcatctacgggattaatggcattgggattatcctaatggcagaattatcaaccgttttgattaactggttcaccgaattagaacaactaaagttaggccttatcggtgggctcatcggtggcttctgcattttaatcagtggcttaggccctaacaaactttggttggcattgattggtttattcctagtcgtttcaacccttggtcttatcaatgccgttgtcacctcattagcacttcaacgacagggcaagcaagccggtatcgcttcatccgttttaggattaggcatgtatgtctttggtattttcttatcaccacttgtcggtatcatgggtagttacacttacctcccattagccgttcttatcttactctgcgaatttagcgcattattactttatcgctatgtccgtcgtattgtttaagcttaacaaaataaaaggcgagacgtccatttggatgtctcgccttttatttagccttcatgattagattctgctatcttcttatctaaataccgttttaatttttctttagggaaagcaccagttactttttcagctgccttaccttttttaaaaattaataaggttggtacggattgaatatcatatcgttctgctaattcaggttgatcttcaacatccaccatcccgagcttaaatgcgtcattagaagctgcatgcaattcttgaatcattggtgtcatgattttacaaggcatacaccaatccgcccaaaagtctaaaataactaacggtttttcagcaacaaaggcctctatattgttagctgtaattgtttgagtcattattttttcctttctaattaaaatataactaacaaaaaaggctgaacctgaggttcaacctttttaaagtctaccttatatgaatcgccgttacttaaaacttaaaatctcataagcaacgcaattaatcatatcatgtgatcaagttgatgtcaactgctttttaaaaataatttttatcaacttctcaatcacatgttcatctctcgacaacatagaatatcttaccatcctagtgggacaacgtcaatcactattttcaatattttttaaaaaacttgaaaataacctttgccaagcttaaaaaaaacgttttaatccactaaaaagcatccctaattgcgctactgattatcccttacaacacttataaatcgcgatttcgccactatttcaacgaattggtataggtaaaaaacgtgttggtcaacaaatctctcaaatttgttgaccaacacgccataatcactactaatagaagtcttccaagcgttcataatctaatatttcaacctgtcgaccttgtctttttatcaattgccgctgttctaattgcttcaattgccgcgataaagtttccggcgtcgtcccaatataagtggctaattcttttaacttcatcgggattttaaccgtcaacgtctcactgaccttcaccaaagccaatagataagtcacaattcgcgattcaaccgattcgatattcatcagattagcttgttgttccaacttaatcatcttattagccgttacttctaaaagtttcaaactaatttccggataagttaatagtagttcttgaaaaggtgcgcgaggcaatgtgcagatcacactgtcttggagtgcctcaccatatacttgttcctcttgattcgtaaagagtaatttctcaccttcaaagtcgccaggctccataatccgcaatagttgttctttacccgctgcggataattgataaaccttaatactcccactagccagaatcactaggcgtttttgcgcagtcgggcttatgacttgctgacccttagcaaccttttcgtggtgcgttagcgccgaaaccttcaggagactatcgtgatcaaggtgactaaatatcggtactagttctgcacaaatatgttgttcaacagttgccacacgcccacttccttctatttagtcgtcatcttcttcatctaagccttcgcgtgcatccttaccgagttggctctgcaatacacgaatttgatgttggttataacctagcatatcaaccatatcagctgccaaagcaaatcgttcttccttttgtgcaagcttgatagcccgtgatacaaataggttggcggtgttaaaatcgttgaccaattccgccatcatagctggcacatcccaatacttgatgcgcgcatcttcagtaagcatcccgtattcagtgtattctgcttgcgtcgtcgggattacttcaccttcatccaataatcgttcagccgtcttatctaatagcatatcattttcagttaataaagttgccacttgtgtcttgaaggtgccattatcaatccctttggcagaccatttcatctgacgaagtttgcgccgttggattgtgaggttagccataatgtggccgatcattgcaccagccgttggtgtattgtgatccacatccgcttgtttcagttctgcttggtaacgttcttcaattgccgctgttgttaacatctcaatgccccctatttaaccttcacacttttaacgttgtagcccagatccgtaaccacttgggtcaattgttctgggttagtcgttgtttcatcatattcagttttcactttgcttgcattaaatagtactttgaccgattcgacgcctgcttgttgactgacacccgcttgaatcttttgcatacatgatgggcatgagagttcatctaattgcattactaactttgccataacaaaaaccaccttttctccatttgatacctttactatactgccagtcgcatgattaaaaattgatcgccatcaagtttagcgaactttaaaccgaattaagcgcatcgcatttaaaatgacgactaaaatactgatttcgtgaaccaacatcccactggccatttgaacgtagcctaaaatcaatcctaatagaagtaacgcgaccgttccaaccgcaatcacgatgttttggaccgtattacgggctgtcgccttagtgaggtaatcggcatagacgacttcagaaagtgtcgattgcatcaatacaatatccgacgtttcaattgcgacatctgtgccggaacccatcgcgattccaatgtccgcaagcgctagtgacggactatcattgataccatccccgataaaagcgactttttgaccttttgcttgataccttttcaagtaatcaaccttctccgctggtaacaagttcgcgtgaaattctgtgatccccacctcacgggcaatggctgccgctgtttgttcattatccccggtcagcatcacaagatttttaacaccggcctttctcaaccgggccaaagctgctttgacttccggtttcaccgtatccgcaatcccgataattagtgccaacgtttgattaatcgccaccaacaccgttgattgcccagctcgttgactggcttcaatcaccgcgcgttgttgcttattaatgataatgccggcgtccgtcaataactgcgcgcggccaattcgaaccaattgttccccaacttgagctttaacgcccagtcctttgagcgtttcaatgtgagcgacaatcggtaaagccgttaagccttgttgttgggcataactaaccaccgccagcgctaatggatgatccgattgcttttcgacggctgcggctaatttcaaaacagtcgcttcatcagccgcatagttcacaacttgcgccactgctgtctcacctttagtgagcgtccccgtcttatcgaaaaccattgtatcgatcccggccatcgtattaaccacctcgccgcctttaatcaagacgccgtttttcgcaccgttaccaatcccagcaacgattgaaactggcgcgccaatcactaaggcacctgggcaacccaacactaaaatcgtaatcgctaatttaaaatcgcgtgtgatcaagccgaccactaacgctaataccaacactgcgggtgtgtagtaagtcgcaaaacgatcgataaacttctccgccggtgatttactatcctgcgcttcttccaccaattcaacaatttgggcaaaagtcgtgtcatccccaacttgattagcgactacggtcagcgtgccattgtcgacaatcgcgccagaatagacgctggcgccaacttcttttttaaccagctgtgcttcacccgtaatactggcttcattaacaaaggcacttcccgtgataaccgtcccatcaactggcacctgaccacccgctttgactaaaacgtgatcgccaattgccacatcgtcgacatcgactgccgtcacagtgccatcatctgcgacaacttgtgcggtttgaggtgccatctccgataatgaccggattgattctcgagtctttttaagtgttcgttgttcaagataactcccgaataagaacaaaaaggtcacaatcgccgattcgttgtattcgccaacaacaaaggccccaatcaccgcaatggtcaccaataaatcgatgctcaccactttaaccttcaaggcttggtaagcctgcatcaaaatcggcgccactccaagcactgaagcaaccaacagtaacccttgcatcacaacaaccagcccacctaaccagtaccaaacatatgccaccgcaattagcagccccacggccaacgctatttgattcttagccacctgtaaccatctttgaaatcgcatttgaatcccttctttctatctgttgtctccattatagaaggccccgaattgaaagaacttgatagccatcaagttagtaaaaataaaaaaatggattttattagtaaaattaattgcattgacatatttttactaaaaatataaataagtattaaaaccctatttatcagcacgttgcaactaatttaaatcctgaaaattaaaaccatcttgaattagttacttactttttttactaaaaaatactattataaattcaagaaaacgttttcaattataaatagactattcaaattcgagggtgagtatatggcaacaacctggtttcaagatgcaaaagcctacattgaacaaaaaacagcacacaacgcaacgactatcgggccatttttcccacacacaacacttgctggccactatcaactagctgaaccgcaatggtggacggctggtttctggcccggtattctctggcatcactatcatgccactcaagaccaagcaacagctgctttagctgaacaacttgaagaaaagatgcaaccactcttaagtgaccctagcaaacttgatcatgatatgggttttatgtggactttaactagtttggcacgttacgatttaacgcacgattctaaagctaaaacaaacgcttttttagcagccaccttattactcggccgcttcaacagtgctagtcgatatttagaagcttggaatagttggcaaggcgctgacgacactagcggcattgtcattatcgatagtttaatgaacatcagccttctttattgggcaagcgaagaaacgagcgatccccgttttgcagtcgccgcaacgcaacatgctgaaactatcttacgcgaattcgtccgcgaagatggttccatccatcacatggtcaacttcaactctgctacaggcgaagtgcttgaaaaaattggcggccaagggtttgccgaaatgagcgcttggtctcgcggttgcgcctgggccatttatggttttgcaattgcttatcactatacacaaaagcctgaattcttttggctaaaaccaatcaagcagagatcgatattgcaaatgcaaacgcgaaagtaaaagatgaacagcaacccaaacttccttggatgttctcctgggcgatgttcctcgccccaatggtctggtacggcccgaacattgccgtgcgcaacaccttgattccccaactgttcggtcaaatcgacccagctaataaagtctgggcgttcggaattattagtgccgcagcgacatttaccggcgctattaccaatttattgttcggcgccttttcagatgtgacacgctccagatgggggagtcggaaaccttacatcaccatcggtaccctcgtaatggcagccatgatggtcattattgccaattcagcatctgtcatgacgattattttcctttggattatctgtgcggccggcgaaaatgcagtggccgcttcaatctatgcccaaatttccgatcgtgtcgcgcctaaatggcggggtaccgcttcaaccttctacggtgttggcttcacgatttcgcaacaagcgttcaccatcttagctgcgcaattcttgggtaatattaaatttgggatctacgcaatggcattaatttccgttatccttgggattgtccacctattattagcgaaagaacctagtaatctcgacgaacccaagatttcaatcaacaaggaaacttttgcaaaatacttcttcttcccaaccaaaggggcgcgtgatttctaccttgccttattcgcaaaattcttcatggttgttggtagcacgattattaccacctataccttattcattttcactgattatatgggggttacaagccaacaagccggcaaatcaatttcgattttctcaaccttaatgcttgtcttcggcgtgattttcgccctgatttcaggcccgctagccgatcgtgctaaacgagtaaagatgcccgtcttattcccactctttattgcgcatccttgggccatgtatgcttacgccgtttttgcagcaattggcaacgggattttcaactcagtggatggcgccttaaacctcaacgtactgccttcgtctgatactgcgggaaaggatttaggcctaattaaccttgccaataccctttctcaaatgattggcgcactcgctgcttccgcaatcgtttcaactatggactatcaaaagattttcttagtcgccattattcttgaactaatcggcgcagctctcatcgcaatgattcgttccgttaaataaccaaaaaaaccccgatattggctaaagccaatatcggggttttttagatacttcaactatgacgatattgctctttgtaaatgatcagcattaatccaccaaaactaatcacactgattaaatatccaatcttctgtaagcgagttgtctggtaaaagacggtcacctttcctttgccctttaaggtaatttgcgttaaaccgttttgcgggttcatttgcatcggtctcagtcgcttctcatgattaatgttagcaacatagcctttgtaataaataaacggtacctcaaccaccgctttttgatgcttaagtgtcgtaaattcgaattgatactgcccccatgtatgtcgcacgttagtgattttgactttatcaggttggtactgaatcacttgctttttatgcttcagaattttttgataatcagtctgtgcgggtagatactcatgtcccgcaccaatatagtacgggttaggttgattgtattgcgcattcgttctaaaacgccaactttgattttgaatactatttgtcgcgtaaataacattgccgacgcccaacatcagaataatggcgtaaaaatagtacttgttatttaacaactgcaaatcatctttagcaatcaagtaactgacaatcgctgtgatgattgcaaaaaaacgccacggaaattggattgtattaataatcgtatggtcgaataattgccaaggcatcaacggcgtgaccattatgaacaaaccgagtgcgatcgcaatcaaatcacggtcatttttggaccgccaaaataggtaacacgctaatcccaatcctagtaaaatcgtgatccccacattaactgtattcgcatggaaaacggcgttggttaacgaattacggaccacttctttaaaagctagcgtacgatctgataaaaaggctagcggttgggaagaaacttgaaacgttgtggtcgccatttgttcacccaccgctaagaaatactgcgctaataaacccagtgataacccaccagctgcgattaaatacttaaaactgccatttttataaagcatcttaaggttcaacaacgtgtagatcacgatgaaaatccccgtcatttccacagaaatcatatggctataaccaatcgcaaccatccctacagctagcaagtaccaatactggtgcttaccagccttcaatctggtcatcattacaatgactaacgggaaaaaggtcaaggcaatgacttccccgattgcctgccggttaactaaatcagcaaagcgatagatactaagaccatataacaaagcaaatatgacggccttcttccttgtaaaccccgctaattttccagagccataagtcaccaaaaaagtacttaaattaataaaaattgcgaagatcacgaaactttctttaatcgacaagcccatcactcttaaaattgctggtagataaagaaaggcatctgggtaaaaaagacttgcggcatagcccatccccccaataaaaaagtaacttattttagggaaaaagtcgccatgtttaattgagagtgctaaattttccactctattcatgtgaaaatgataatcggctccagataaaattttattaggttgtaaataaacaatagcgaccattgcaatactaacaattagaaaaaataatagcgttacagctaccacatgttgacgataaaaatgctttaatcttgtcatcatctgcacctcgtaaagtcttcgaagtatcgactaccatctattcctgaatggatgaatctgatggtggatactcgttatagattaactttaccgaattgcacttgaaaatgtacagtaatttgttttgcgattaataagataaaaattaatattttaaatataactaaacactaatgtgtttaacgatataaaaaaacgggctaatagttaattaacccgtcttattacatgtggtttataaatgaatataataataattaactaaaagcgtttaaataatccgtactgatatcaaactggcgagtacgacctaattctggaaaatataagtcactagcccattgccaagaagcattgccagtgtgtaataattggtcattagaagggttcaggggccattcagcgacccagcaggtctttgcgcccaatttagtcatatccaacactgaagaaaaccacgatttagaggaataatgatagacatttttaaaaccggccgcttttaaagtgtcggcgaatttcaaagcattgctagtcgcattcggactgttaactgattcgtaatcattcacaaaagatgtattttgcgctaacttcaattctttggcatagttcataaagtaagtggcctcttccgcagcttcttggggattagcgaaccaactaaaatggtagacactcacttttaacccggctgcctgggcatttgcaatctgttcaggggctaagggattgcggtaagaatccccctccgttaatttaacgatgacgcctttaatcccgtattgattcttcattaattggaattcatcttttgagatgctgccattattactcgaaatatcaataaaatctttcgccggacgaccagtttcagccgctgagatccctgattcatcggcaaaagacgctaggccattttgtttgatcaaatcacccagcgcatgattattattctcattaataatagtatgcgttacggcacctgaactgccagtctggttagcagcatacaccgtattttgtgccagcaaagcctcgatagtaatagcgttcctaaagttaacgtcacaatttttttcattgttggccccctgcgtattcttttagattatgattatccatcagtatgaataagatttatactatagatactatatgtatattattaaatagcgccgattcaaaatcaactaataacccttttagataagccaaacaaaaaagacctgcgtcaaagactcaggccccacattgtatatgtcctactattagcggatgcatttagtcgttgattgtctaacgacaagttctgtgctcaaaacaatccattgagcaattgacgggttttcaattcgtttttgtaataacgccataccgacctcacccatttcttcagtaaaggtcttaaccgtcgtcaacggcgggttcagataacgcgcaaaggacaggtcattaataccgaccaccgaaatcgtctctggtaccttaatctgttgggctgctaattcattcatcacaccaatcgccatcgcatcgttggcggccaaaatagctgttggtaaattatcaccccaactcgctaaggcctgttttgttaatttttcacccaacccaacggttaagcgggcgttggtgtcgacgaagaagtactgctcatctaataattgatagtgtcgcataatatcgcgatacgtgttcacaactggcgttcggtattctcgataaccatgtaaattatcgtgttcctcggcaccgataaatgcaatcttctgatggcctaactgaatgagatgttcaatcgccagttctgcggcttgttcatagtcactattaatcgtgtcgaaattttggagcggaaaattggtcccaataaagaccgcattatcacttaacttaacaattttcttaattgtttgttcgtcgaacttaccaatacaaatactgccaacaactgatttcaaggcatctgattctgtatcacccttaattaaattataacccagctgttgagccgctttttcggcgccaatccgaattgacatgtagtaaagatcgtcaaactcttcatccccttggcgccattgaaataaagcaatattcttttcggcagccttagtacgcttagacgacttccgtttttgatgcttctttgtcttatattttgtgtagtttagcgcttcggcagtttcaaacaccttacgcttagtcgcttcagtaacgctcaatgatgcatcgtaatttagaatccgcgatacagtcgcaattgagacattcgcttgttccgcaatgtcgctaatcgttgccatggtgactcccttcgataacttaactaaaaaaataagcctcgacttattttgaggcattcgcaatcttaccaaagtgatcatgcctaccctctattatagactatttcaagcctaatataacaggaattaggcgagtattccggtcaaaataaaaaagccaagttgaagtgaacttagcttttcttaacacttatttctgattgtattgttttaacgctaatgcaaaatctccaagtgttgccgatccattgttctcaactaacggcatcgttatataatcttctaacttagggacttcaacataattgtttaattgttctttaaattgcaatctaactttatctaagaagattttattaactaccccgcctcctaaaacaattttattagggcgaataatcaaggtttgttgcaccacagcttgtgctaaataataggccataatatcccaaactgggtctgactgatcgacatcctgtccttttttgcctactcgcttctcaaaagtgggtccagcaatcaatccctctaggcaatcaccgtgaaatggacagattccttcaaattttaaatcatccggatgtcgttttacgagaacgtgtcccatttcaggatggcccaaggttccaattaactgaccatcaataatagcaccggcaccaacacccgttccaactgtgtagtaaactaacgaatcaacaggttgttgcgctatccgagcagctacatattcaccgtacgctgagccgttaacatcagttgtaaaaataattggccgtgcaagttctttctttagataacctacaaaatcaacatcatgccacccaatcttgggagtatttgtaatatatccatatttagcgtgatttttccgcaattcgattggcccaaatgaagcgactgttattactgtcacatttgggaattttttaaaaaaggtgactactcgcgctaaagtttcttgtggcgttgtcgtcgcaaatgttactttatccttaacttgatagtgctcatctcccacggcacaaacaaatttagttccgccggcttccacactgcccactaataattcactcatgttacttttcctcattcccgatagctacaaccaacgcatcatacggctgtaatacaccacttgtcgctattttatttaataataaattattgctaataattttttgattaggcccgaagtgctgaatgggtagcgtataactttctctattcttagataagttaataataactaaccaactctgttctcctaacatccgtttgtagctagtcacattttgattacctgttggtacattttcaaatcggccttggcgaataattgcgttacgttttcgtaattttattaactgctggtaagtcgcataaatagaccgttcatcttgtttggccaattcaacattgatttctaaatagttaggatttaccggtaaccatggtgtcccatctgtgaaacctgattgattcttaccattccattgcatcggatgccgcgcgttgtctcgacctttagcattaatcccatttaggatatcacttatcgcatagccttgttgctgtcgttgttggtaaactcgccgactctcaatatcctcaatttcgtgataactcgtaattggataattggtcatgccaatctcctcaccctgataaatatacggtgttcctttaagcatatgcaggtaaattgctaatgcttgcgcacttttttcacgatactggctatcgtctccccaacgtgacacaattcgcggtaaatcatgattactccaaaataacgagttccaaccaacgccatctagcgctaattgccatttactaaataccgcatgtaactctgctggaataagtggttttaaatcccagcgagtcatccctgattgtttatctaaattaatttgttcaaattgaaagatcatcgatagttcgtggcgattaggattactgtacatctggccaatttcgggtgttgccccccatgtctctccaaccgttactacatcatactgtgaaagtacccttgcgttcatctcttgaagatacgcatgtaattgcggtccgttttccttaattttgcggtcaggttccttccctatcaaatcaataacgtccatcctaaaaccaccaatccctttttgaagccaccaagtcatcatctggtagacagcttctctaactttaggattttgccaatttaaatccggttgttctttcgcataaaaatgtaaataatattgcccagtaaccgcatcaaacgcccaagctgatcctttaaaattactttgtaaatcattcggaacactaccatcggttgcagggtctcgccaaatataaaaatcacgatacggattatcttttgattttcgtgcttctaaaaaccatggatgttggtcacttgtatgattaacaactaagtccataacaattttaatcttacgaatcttcgccgcttcaattaactgctccatatccaccatagaaccatattccggattaattgcctgataatctgaaatatcatagccgttatcaacattaggggattgataaactggtgatagccaaattgcatttacacccagatcaactaggtaatctaatctttgaataataccctgaatatcaccaattccatcgccattactatcttgaaaacttcttggatagacttgataaaatactgcattttgccaccagttagtttgcatgtaactaccccttaatcctttttagcgtgtaattgaataatttcttcaccttgcatagcagccctgtcgactgttaaaagcgaatcaacttgtgcatatcccgctgtattcgtcacaatagtcattgttaacggtgttagccctgcctgtttaatcttatcaatatcaaaatgacctaataaatcgccttcgctaacatgttgtccctgttggacaatcttttcaaaacctacaccatttaaattaactgtatctaaaccaatatgaattagcacttccgcaccatcatccgattttatcccgtacgcgtgaccagtatcagccgcaattgttatcacaccggtaactggtgcaagtacatcttgagaagttggcataatcgcaataccttttcccattgcttcacttgcaaaaactggatcgggtactgatgctaagtcaacaattcgtccggtaactggtgcactaatcttttcatcttgtaatctctccactacttctggggtagctggtgcttcattgattatttcttcttcagttgtcttcattgcctttttaccatataagtatgtccccacaaacgcaattacgaaactaataatagctcccatcataaaactagggatactcttaggtgcaatcgcaataaacccaataattcctgcaggtcccattgatactgataaaacatgtaataaaccaataataaacgatgagattcctgatgcaattaaaccaataaagaatggaaacttcaattttaaattaaccccaaataatgctggttcagtaattcccaacatcgcagaaatcccagcagaagtcgttaatgacttttgttgtttattcttagtaacgaagaatacagcgaaagttgcagccccttgagcaatatttgccatcgctgcaacgggaaaaataaacgatccaccagttttggcaatatctgccaaaagtgtcgtttcaattgccgggaagctttgatgtaggccagttaagacaattgctgaataacccaggccaaaaatccccataccgactgcacctaacgtttgataagcccaaactaaactatcagtaacaccatttgaaacaattctcaatgcaggaccaactaatgtaaaggttaaaaatcctgtgataataatcgataacattggtgtaaacgtaaaatcaacagcatcatttaaatgtttatggaagaatttctctaaattagcaagaatgaaggcaactccgataaccggaattacttgaccttgataaccagcttgcgcaatattcaatccaaagacatgccaatacgtcatatgccctgtagcgatactttcagcaaccccataaccattaactaggttaggcataaccaacatcattcctgctgccgcacctaaatatggatttccaccaaatcgcttagttgcagaaaatgcaattaaaattggtaagaaggtaaatggcgctgacgacatcatattgacaatctcagcgaatcctttccactgtggaaacatctggacaattgattgtgcgccaaacaagccttgacctgtcaaaacattattaatagccattaataggccgccagcagttaaagctggtattaatggcacaaagatatcgcttaaaaccttaatgaatttcataataatattgtctttattatcagccgcaatattttttaattcttctttagaagctgctttaatatttacaatcttaataaattcgtcataaactgtattaacatcccctggaccaacaataatttgatattggccattcgcattaaacgtaccctttagatctggatcattatctaatgctgcttggtctattattttcacatccttcacaactaatcgtaacctagtcgcacaatgagcaaccgcaaccacattatcttttccaactgcctgagctattcgtttcgctacttccttatgattcatgccgaacactccttttaacattattgttttacgtatttttgcaaacgcttttcaaatacgataatacaaccgtttacattttatgtcaaacgtttatcacattttataaaaaaatacataatatacttatttataaaggttcgaaagaatgatatacgtttgacatatcaagcgtttacatttatattatatttattaataccatgtcacaaaggagtttattatgccattaattacaaactggacacgtcaaatacgctatcaaccttactcagattggtccatcgattatcaacaacaattgttgaatcgtgtccaaaattcaccctatcgtctcaattaccatattcagccagatacaggtttattaaatgatcccaacggtttctcttatttcaatcaccaatggcacttattttatcaaagttatcctatgggaccagttcacggtctaaaatcctggcaccatcttatttcagatgatcttattgattggcgcaaagcaactcctttattacctggcggaaattacgatagtcacggcgcatattctggtagtgcattaccaattaatgatagactcttccttttttataccggtaacgtcagaaatagtgactgggagcgaacaccttttcaaaacggtgcatggctcagtcaagcaggtactatcagcaaaatatctgagcctctaatcaaacaaccacgccactataccgatcatttccgagatccaatgatttttaagtatcaagaccaaatcatggcgctaattggcgctcaagataacaataaaattggtaagattgccgtttttaaagcggatcacaataacattaatgattggcgtccactcggcgaattaacttttacaagtgaaaaactaggttacatgattgaatgtcctaacctcatctttattaatcatcagccggttttaattttttgcccacagggtttaacatccgaagttatttcttaccagaacatctatccaaatatgtatgtggttggtcattcattcgaactcaatacaaccaccattacgcagccttctgagcttactaatcttgatgacggctttgactgttacgccacacaagcttttaatgctccagatggtcgtgcactggcagtaagttggttaggtttacctgaaattgaatatccaactgataaagacggttgggctcattgcctaagcctagttaaggaattaacactccatgataatcaactttatcaataccccgtcgaagaaacaaaagcgctccgccaaacaaaacaaatcctatcactcagtaaacaaagcataatacctacaactaatgcttatgaattagaactcgaagtgccggcaaacactagtcaaacactccacgtctttagcaatccctcgaaatcaaatggtttagtactcactatcaatacaacaaatggtaaaattacaatggatcgttctactgccggggtctcatttggccaacaatatggtcaaatcagaacaactaatgttcaaccccatcagtctattcacattaacttattcgcagatcaatcagtcgttgaactttatatcaaccatggtgccaaagtcatgagtagtcgcttattcccaacagaaaatcaaaatacaatctggacagagataccacaaaaagcacaactttggcctttatctaaagtaaataacaactgatatgactagctttagggggaaaaaacgtgcctacaaaactaacggatgttgccaaattggcaaaggtcagtccgacaacagtttctagagtcattaacaactatggttatctcagccaaaaaacaattgataaggttcatgccgctatggccgaattaaattatcaaccgaataatttagcaagatcgttacaaggaaagaaagcccaaatgatagggcttatttttccttctgttagtaatccattttttggagaattaattgaacgcctcgaaaagaaactttttgataaaggctacaagagtattctttgtgacagtaatcgtgaacctgaaaaagaaaaagcatatcttggtatgttagccgcaaatcaagtagacggtattattgcaggaggtcataataccgaactgcaagaatatgaaaaaatgagtgcacccgttatttcatttgatcgactattgagtacacacattcccattatttccagtgataactttgccggtggtcaaatcgccaccaataccttgattaacctcggcgctaaacggattggtattattactggcagtaacgaaactaattcaccgacacttttacgacttaatggctatttagatgcgctacaaaaaaatggcttagatccttttgtcttccaaattaaaagtaccacttcgaatagtcttaaaaaaattgaaattgcgcgtattctacgtgaagaacacttagatggtcttttttgtactgatgatttaactgctatttccgtaatgaatgaagcccaaaatcaaaatattaagattcctcaagatcttaaactaattggctacgatggtactgagttaattcagaaatacttcccacaactaacaacaattattcaaccgattgacgagattgcctcgctgttagccgaactaattactctacgtattgaggatcctagtgctccattagagatgcgctatacactgcccgtaaaattattacaatctaattcaatttaaaaaaagcagttgggataaaattattttatcccaactgcctcttttttatttactaacaagacttaaaatgatagacaactgtatgaaaatcggtcttatttcgaggtaacgttaatccaacattcattaactcgtccccaccatattgttcacctgaatcagactgatataccttattaggatctaaataatttaatttaaataccggataatgcggtgctgcttgtgctagttcactgtaaatcaacacattaaattcactacgattttcattgatgatcaaccaagcagtgtagttatcatctgtaacaactaagcgatagaaccgaccaaattgagttaattgccgttctttttttgcaattttggtttgttgtttaatctgttgtttctcatcagcacttaattgcgttaaatcaagttcatagcctagattcccaaacctcgcaatatcaaacctcgtctgtatatctgttgttctacctacttgatgattaggaactgcactcacatgtgcagccatcgtaattggtgggtatagtaggctatagccatcttggataacaactctgcttggtgcatctgtattatcactcgtccaggtctgtggcatgtaatatagcatgcccggatcaaaccgcccacctccgcttgaacaaccttcaaataatactgttgggaactcattcgtaatcacttctaacacatgatataagcctaaaatatatcggtgccaaacctcaccttgttgactatcatcgactgccgtactataaacatctgacatatgtcgattcatatcccatttaatataatctatttttccagtactaagatgttgtctcagcatttgtattagataatcttgaaccgctgggcgtgtcaaatctaacactaattgatttctaccttccatcggttcgtaatttggaacatgtaaacaccaatctggatgctgacgatatagattacttttccgtgaaatcatctcaggttcaaaccacagtccaaataacaagccatgttgcttaatcgtatccgctaactgtccaattccatgtggtaatttagtctgatcaaccgaccagtctcccaaagatgtcgtatcatcattacgcccaacaaaccacccatcatccaaaacaaatagttcgataccaacatcagtcgcttcttgcgccaatgcttcacatttagcagcgtcaatcgcaaaatacattgcttcccaagtattaattaaaattggccgttcctggtggctaaaacgtcgcggtactaaatgatcctgatataattgatgaaaattctgactcattccgtttaaaccagccgtactataattcatgatagcttctggtgccacaaatgtttcattcggtgctaagcgccaatcaaatgtatctgtattcaagcctagctgtgcgcgaatattaccgtattgatcttgctcgacttgtcccatgaaattaccactatagaccaaatgaaatccataaaccacaccagtatattctgttgttttaggtgataaaagtgcaaaaaaaggttggtgttgcggactacttgccccacgaacactttctattttttgaatgcctggataaataggatgttgattgcgattagcttcattaatatgtgccccgtacaatgataaccaggatagcttttgaggtgtaaaatcgattgataagctttgacaattctgaattgtaattgctcgttgtccaacattcgtcacttcttgatgcgttgcgataatatctaaatccttaaagattgtataatacatcgctacccgcacaccggctttcaaatcctccaaattaatccggagtgtttgtgcatcatcgtcactaacaacataagttgccggcaagtcacttaacttgggcttcccagtaattatttggtaatcacgatattctaggtcaaggtggttattgtgactagcttgttgaattgttaaagcagggattcgataatcacccgtatctcgtgttggacaaatcagtggtaactcacctaacgaaaccgttcgatccgtcgatggattaacagctaatccacggtccgtaaaccggatagtgttactttcatgatactgacgaatatgagcaccaaaatagcgatgaattacatatttttgttgaacgattgctaagaccatactgatacgcccattatctaggtaaaatattgcctttttttcatcaaaactaatcattttatcacatcctatttccacttatttattctataataaaatgaatactaatccacaacaagagtaacaaatttaatgggagggtaataaattggggcttaatcattcttttcagctgcactatgatcacacacagtactttcatttaatcggtggcggaaatgaaactgtcactgcaaattattattgggactgtcgccaaagaactgggaactattgcctttttcaatatacaattaaaggacaaggtcatttacaaattggcgatagtcattacaccctaaaacccggtgacgcctttttagcgacaattcctggtaaccagatttattcattagcgccagatagtataaattggcaatttatctacttggaattctcaccacattttattgatcaatggcaccaaatgacacaagatacgcccatactgaactttaaggaacatcccgtattcgttaaaaattgtctagcgttaaatcaaataggtctccaaaatacgtttagtgattatttcgaaaatacaagtcgatcagcacaatttttctttgatctcttacgaattagtcaacatactcaccaatcggctcaagataaatatccagaatggttaagccattaccgtcagtggctagatatccactacgatcaggacatttcattagaagatgcggctgatatttttaataaatcaaaatacacactcattaaagtctttaaatattactaccaacaatcaccaaagcaatacctaattgatttacgtataaaaaaagcaatgcgtctactcatcgagcatcccgaattaaccgtcaagacagttgcgcaaaagtgtggctttcagtcagccaattacttcaccaaagttttccataaaaaaacaatgtattctcctctaaaatttgctaaagaaaatacattgcacgatagtagtgttcattattttaataactagatctgcgcttattaataaacttaattattttagcgttagttcatattcctcatgtcttttaggatcaacctgcgttgtgcctggcatgaaatggatagcttctgtccctgcttctttggcttggtggtaataccatttcttccaccgcaagaaagctaggttggtttctaatactttaattttagcttctaactgctgttcgtgttcgaccataaaatcgtaacggtcaggtagtgtttcgtcgcctatcatacaccaatcaataaactgaccaatttctctaatcggaatcgctgattttttcaagcagtcgattacttcgagataacctaaatcatcatccgtaaaaatccggtggacagctgtattccgtttggcaaatggtaataaaccttccttatcgtaatagcggagcgtatcgaccgaaacacccattttagttgcaatctcaccgattaaataagttgtcatcttttctccttgacctggagctagctccaggtagtatgcctttttatagcataatatagaaagcaggttttgaccactatgaataaaccattaatcgttattacaggcgctagctcaggatttggcgccgaaatcgctaaaatttttaatactgctggctatccagaattactacttggtagacgggctgataaaatcgctaacttacctttaaactttgaaaacgtcttaatcgaatcagtcgacgtcactaatcaagcggaatttaaaactgcgattcaaaaagcagaagcgaaattcgggccgaccgacttactggtcaataatgctggtgttatgttactagggaatgtcttgacccaagacgccaaggaatggcaaacaatgcttgacacgaacgtcatgggcgttctaaacggcacgcaaattgtattacctgccatgattgaacaccaacatgggacaatcatcaacatgtcttcattagctggtcgtaagactttcgtaaaccatgctgcctatgtcgcttctaaatttggcgttcacggtctaagcgaaaccatccgtgaagaagtctcgggccaaaacgttcggatttcaatgatcgccccgggcgctgctgagacagaattactaacccacgtcactgatcaaggtgccttaacagactatcaggcttggaaagatagcatgggtggcattactttagacccagttcacgtggccgaatccgttaaatttatttacgacatgccacaagcggttaatattcgtgaactcgatatcgcagcaacacgtcaagataactaatttttctaaagcgtgctatgccaaagttacttttggcatagcacgctttttttatacttgccgatgaccgccccacgtatttgacaatatgttacacttgcaaactaaagattgttttacgtcgctatttcctctaaactagactatagaaagcggggtattacttttgccaaaatatgaagagatcgccgacacacttcgccagcggattaagcaaggaatttatcctgctaattcgttgctacctaatcaggttgaacttgtcgaagaattcgatgctagtcgcatgacggttaaaaaggccattacgattctcaccatggaagggctcgtttttgctcgtcgtggcgctggcaccaaagtactggaccattctttttggaataaaaatactgcaccagccgatcaatatcgggggatgtcctttgatttagctgatgccaatcaaaccctcaccagtaaggttattaccttcaaagtcaccttcccctcaccagaagttaaggaacgccttaccttgaatgcacaacaaccggtttacgaaatcattcgcttacggattgtcgatggcgtcaacagcgtccttgaacatacatacatgcccgttaacctagcaccgggtttaacagatgaaattctagaaaattccatttacagttatttgaagaaagaccttcacttaacttttgcgggtgctttccgaaatattcaagccgacaaagctgataaatatgatcaagaatatctcgaatgtgcgcctactgatccggttttagaagtcgaacaagtggtctatctcgatagtggtcaaccgattgagtattcccggagtcgtaaccgctacgaccgccgcggttatacttacttggacgtcaataactgctaattacaacacaaaaagaagcccttatcgcattgataagggcttcttttttatagtgctttatttttcaagatcttgtaatttttggttgtcatctaatactgaacgaccgccattaccgattttttgtaaatgattcataccgaaccacaataggatcaatgcgactaccataaatagtagtaacgtgaagactgtttgtagcacttgaccgttacctaaaccagatgtaattgcttgtctgaagcctaggattgagtaagtcattggtaagaatggatggatcacattgtagaagtggtttgtaatttccattgggaatgtcccacctgaaccacctaattggagcatcaagagaaccatggccaagaaacgaccaggattatcgaacgtcatcgataagaacatgatgatcgccatcgacgtcaatgagaacataattgatactaagaagaattgggcaggatgatcaacatttaaccctgcgatcatcatcaaaccaggttcgatgattgccatgccaacagcaactaaggcgccgacagaaatcttacttaagtaccaagctgttgctgattgaccagtcattgaaactttccgaattgggaaagcaaagttgaagacgattgccccaacgaataaggctaatgaaagcacgtatggtgctaaagcatgaccgtagttagggacatagctatagtttgagtgtttcaattcagcaggtgcagcgaacatatccgctgtcttattcgttaattggatatcgttaacttgttttgcaccacccttaagggcagttgctaaggtcttgttaccatcagttaactgaccagcaccgtcgtttaacttagctgagttagcagctaattgacttgtaccatcggctaattgaccaacaccactcgttaacgttgggatcttagcgtttaattgaccaagaccaccgttcaatgtttcagaacctgttgccaattgactaacaccacttgttaattgtggtacttggctattcaattgaccagtaccagttgctaattgttttgaaccagcagctaattgaccaacaccgcttgtcaattgtggtacttgaccgtttaattgcgttgtaccagcatacaaggcttttgaacctgttgctaattgaccaacaccgcttgtcaattgtggcacttgaccgtttagttgtgttgtaccagcatacaaggcttttgaacctgttgctaattgaccaacaccgcttgtcaacgctggtaccttactatttaactcgtttgtcccatcacttgcttttgatacgccagctgtataggcgcttaatcctggaattaagcctagttgactcggagtcccaacaaggcctaatttaatttgtcttaagcctgcattgatagtatctgttgcttggatagcccccatatctgaaggtttatcactagttttagttaaacctgcgctaacagtttttaaaccacctgttaattcatcaattgcttgatctacgcccgatttaagttgaggtgctgcaacatataattcatttacaccttttttcaatgcttgaagacttgtcattaagttagtcatctgcgtttgaactgattttagatgtacaccagtatcttcagtattagttttaatcgtatttaaatctgcaccagatgaggcaagttgattagctgtagcagtaacactagtccccgcactttgaagtgcattatttagtttctgtgctaaagctggatcttttgataatgctgctttaatttgtggatcagaaactacttctgtaatagcttgtaattgcgcaccagtgttagcaacttgactagctgcacttgtacttacatttttatcatatagtttactattaatttgttgtaatgattgtcctgtacttgtagcatcagttgctactgccgttaagtccgttgttacttgttttgaaattgcatctgcttgtggactatttatccccgcgttaagtttctcaacaccagtctgtaattcgcccatgcttgatttcaataaatctaacttttctgatttactatctaactgatcatcaatcatattagcagcagcagataaggcgccacttaattgttgactaccatcgattaactgatcaacgccgccatttactttaccagcaccagcaactaactgatcactattactatctaaggcatttaatccactctttaattttgtaacgccaccggctaattgtccggtaccatcatttaacgtttgtaaacctgtgtttaattgaccagcaccgtcatttaaatctttagcacctgaagccaacgcacctgttttactatttaacgtttgtaaacctgtgtttaattgaccggcaccgttgttcaattggcttgcgcctgaagctaatgcgcctgtcttactgttcaatgtttgtagacctgtgttcaattggttggcaccgctgttcaattggctagcacctgaggctaatgcgcctgttttgctgttcaatgtttgtagacctgtgtttaaggcccctgaaccggctgctaatttttgaataccgtctgataaaggtgtcacgctagttttcattgtcatgacgccatcgttgaccttatcaacaccagctgtataagtgttcaagccatctgaaagtgtgactgaaccctttgttaacttcttagcccctgaagcggctgtgctgaagcctttaccagctgttttaacttgtttgaacataacttgagcataagcctttgttactgtttcacgtacttgggcgttcaattccttggcacccatttcactgataacttcaccgatgaagttcaatgaatcgtttgtttcatattggatttgcatctttttaggattcttatccaaaactgttgcggcgtttgctgaaaagttcttaggtaaagtaacgactgtatagtattctttgtccttcaaaccttgtttagccttcttggccgaaacgaaacgccaacctaattggtcgttcttctttaattccttaaccatgtctttaccagcactcaacgtttcaccgttataagttgctggttgatcattatttacgacagcgactggtaattcaccagtactaccgtaaggatcccagacagatttcaggaaaaagacactgtacaagaacggaataaacatgattgcgattaacgaaatcatgatgattttattcttggcaatgaacttaaattcattttgaatcatcttcatctgtaaaactccttacttaattttgatgtataatcaattacattcaatatccacgataactgaactagtttaaccttttttcatgaaaatttcaacccttatgcattaatcaatcaaacattagtcacaaaaaaagcgttccaggttatcctagaacgctttagcacactaattacttcctataatatgggttcttctataaattttgcttagccataattctttgtgtgatatatccaaagagaatcatcgcgatgatttgaatgccgtaaatcgctagataatggcccatttcgtttacatcaatcgttggaattacaagcaatgcaaatgacgttatgatccgataaccccaagtaagaccgatgaaaaccaaaatggctttttttgcccctcgcatccaagtgcaggccaacaacatcaatgtcaccgttgtgatataggctagaataagatcaatcaaataataccaagagaaattattcatgaatgacgagaagacgagttgcagcatctcgatattcttattcaattcaatgactagcaaggtccctggtactaataaaaggacaactgcggctaacatcgataagcaaatcgtcacaatcaatttggcgtagaataaatgtttccgtttaatcccagaagccatcatcagggccaaaacatcgttattatagtcgaccgataaaacgtggaacggataccagtataataagatgaaattagcagctattaacagcataatactaataatcataaatgagccaaaggttttattgccatataactcagctggtagtgattgtgcgtttgccaatatcaaggcaaaaataatattaaggaccgcaataatcccaaaaattaacatatatactttttcatggaaaaatttgaagaattccatttttacaattcgttggatcgtcatctaatcacttccttagtttaatttattgtccaatgcacttagtacgccaatttcattgatctcaatttcagcatcaattaatttcatttggacttctcgccacttaggatctttaatcgataattgaatccgaccgtcggctaacacttcatgttcataagccatttcggttaaaatcgcttgaacttttgcattatcagtcgtgttgaccacccgtagtttcttgtcactttcggtcgctaaatcaatggtttcacgcaattgaccgtgatcaatcacaaatactgatttacagaacatttcaatatcactttgaacatggcttgagatgagtaaggtcattgacccttcgctgatcaatttttggagatagttcttgaaccattgtactgtctctaaatctaggcctctaaaaggttcatctaaaataagcagttcaggttgatgcaataacgcgattaataagattaatttcttcttcatcccgtaagaataagttttaactttttgatccaagaccgcttcaatgccgatttcagcagctaatgtgcgcgcttgttcacggttgaattcaccacgtaagccactaaaataagccaaattaaaccaaccagtttgattcatgtaaactgacatgccgtctaagacaatccccacccggtttaaaatagctggattatcgcggacgttttgaccatcaatttgaatttcacccgaataattcgtaatgatattggttaagctcttaaataacgtcgttttaccagcgccattatgaccaacaatgccgtaagcaccgccatctggaatggttaagttttttaaatccagtgcaacattatttttatacgttaccacaagattattaatttcaatttgcattgtattcctccttaactaatagtccccattatacgggtgtgaacccttcaaacggtaaagattaactaaatttaattaaaaaacgcctaacaataaaccgattgttaggcgttttccgtgtatattaaatgcttttttaaagctgatgcctgcgcttagatctgaacgtcaaacaattactgacgtaattattcgccattccgtgctaatcctcaggatatacccggttgggttcacactctagccaatttttgtcatgccgcccatgtatggtaccaatgcttctgggattgtaacagtaccgtcttcattttgatagttttccaaaatagcagcgactgtccggccaaccgctaatcctgaaccgttcaatgtgtggaccaagttcacgtggccatcttcgtcacggtaacgaatttgggcgcgacgtgcttggaagtcggtacaatctgaacagcttgagatttcacgataagtattttgagcaggtaaccaaacttcaatatcataagtcttagctgatgtgaagctggcatcgcctgttgccaatgtgatgacatggtatggcaagtccaatgcttttaagatattttcagcatcgttagtcattttttctaattcattaaatgattcttcaggttttgtgaatttcaccatttcaactttgttaaattggtgcatccggattaaaccacgcgtatcacggccggcactcccagcttctgaacggaaggctggtgataaagctgtgaagtagattggtaattgtgcaccatctaagatttcatcacggtagaagtttgtcaatggcacttcggcagttggaatcaaggtcattggttcgccttcgttagtcattgtgtaaacatcttccgtaaacttaggaaattggccagtcccaaacattgattcgccgttaaccaagtaaggtgtaatcatttcttcataaccttctttggcatgttgatccaacataaagttataaacggcccgttcaagacgtgcacctgcacccttgtaataaacgaaacggctgcctgaaactttagcagcacgttcgaaatctaaaataccaagtttttcaccgatatcccagtgtgctaatggttcgaaatcaaattcacgtggtgttgaccatttacgttcttcacggctgaagctttcatccaaaccaactggtgctgaatcattagggaagttaggtaagcgaaccaagatatagtctactttttccttcacttcagctaattgtgcatctaattctttaatttctgcaccgacgttcttcatagcagcgatttgttcagttgcatcttccttattgcgtttagcaacagcgattgcttctgaagcagcgtttctatttttcttcaattcttctgtgcggacgattaaagcgcggcgtttttcatctaaggcaactacctcgtcgatttctgcagcatcaataccgcgagtcgctaatttatcctttgcccattggacattttcccgaattactctgatatctaacatagcactctctcctttttatagataataatcaacaaaaaaagccttctcatcccctaaattgggacgaaaagacttcacattcgcggtaccacccaagttcactgattaccaaataaccagtgcccttcattgctgataacggtcaggtgccgtgtagttattcactacccactattacgctggaatactggattcaataccttccaccaaccggtatctctctgtcaatccatataggcgcttattcacgtgtttttctcttgcattaagaataacccatttggctattaaattcaatcttaatcggctgacttttgtaaccaaagctctcttaataagccatataaacgcccataatggtcactatccgcattttgattccacttaaacatcactgcattcgggttaaccttattggctaacgagatacttgacgttgtgatgactagatcggcatcagccaaatcagcatcgtcgtgcgtcactgtcacataacgaatattcttcaaagccatcattaaatcaaaataacctaagaatgattgttctgatactaagacgaccttcaccgggttagtaggtgctacccgttgaacaacttgccgtaagacattataaagcccgctaacaatttgatcgcgtaaatcgctgataaaatctaattgcttgtctaagagtaagtaatcgaccgtatcttcaatatcttgttttaaaacggggttatccctcaagcgtgtgtaatcgtccattaaatggttcgccataatcgacatcacatcttgtttaaacatatagattgtcatgacagtggccattaatgtctgaactaatccttgataatcttcttcatccaggttcaaatgttcttcaagattaattggcaccttagccatgaaatccattacgaatttatgggtcttaggaatataacgttcatagcgatcttcataagatggcatatactgattattcccttgtaacaagatgggcccaaagttcatcaagtcataaaggttaaaagattcagccattgcttcttccatcgtcatctgagccattgcatttttaataattaacgctggcccaatgaacggttggttaatatacgttttaatcatattggggactgggtaccgcaataaattttcttcggtaggtccttgaatatagtgccgctgcgcaatccgatagtacattgtcacaactaagtatgcacctaattcgcgggttaaaacatttggttttgccaattggaaccgttcgattgctaaatcaaacgcctttaaagcatccaatcgatcaatcgtttcaaatggccatgtgtgcccatcagtcgctagccagaataaaatgatgaggactaagcgaatcttattctcatcaccttctaggcgaattggatcgtaatacatgcgaatatcaaatgaccggattaaatcccgaacacctttcaaatgccgcaatgcggttgctttgctgatatcgtgtgatgtccaaaattcttcgaacgtcacttcttcacctttcaacaagatgtttacaaaatcaaaaacatctgattgattcactaaatgatagtgataggcatctagtgggacactaaataatctttgaatatcttcagtgtcttcaccgataacttcttttaaatcagcgacgatactcatataggtattatatagactaccataagtccggtttaataaggcggcgacctgttttaaattaacgtcgtcgactaatggttcattttttcgagataatgcaattctttttttgacgggtaattcatcccgcttcaagctcgcgatatccaacaacagaccatatttatcattttcagcctgtgttaaaaaaatactgtcatttctattcaactgactaacctcccggaaagtatctataatgggcaatttattttaccattaatgacttcgcaatgaaaccatacctccccttgataaacaagcgttgctttttgcgctaaaaatgctagaatatttaagtgacgtttggtgatgaaacaccacatgttgtatatcaataacattcaaaacacattttatagtcaaaagagggagactgatgacattgctcgtacttgctggcacaattggtgcaggaaaaactagtttaacaaaatatttatctgatcatttaggaacggaagctttttacgaatccgttgatgataacgaagtattacctttattttataaagatcctacaaaatacgcttttttactccaaatctatttcttaaataaacgatttgatagtatcaagcaagcttacacagatgataacaacatcttggatcgctcaatcttcgaagattcattactcttccacttgaacgctgatctcggtcgtgccacagcaactgaagtgcgcgtttacgacgaattgttagccaacatgatgcaagaattaccatttgccgcccacaagaaacgtcctgatttattaatccatgtccgcgttagtttcgaaacaatgctctcacggattcaaaaacgtggtcgttcttatgaacaattagaagccgatccaaccctctacgactattacaaggaattaaacagccgttatgacgcttggtacgacgcttatgatgaaagtcctaagatgcaaatcgacggcgacgtattagacttcgttgaaaacgaagctgatcgtaaaaaagtcatcgatatgatcgaccaacgggttaaagaattaaacgaacaacaatctaaagcaatctaaatctgatttaaaaaaggcctggataaattattatccaggccttttttgcatacaaatgtgtacgttatcaattgagctcagatttttctaagtgtgatttttgaatccataattcgtgaacaatcccgtataaacgagcgtaatgatcactattagcattcaaccgccaaacaaacggcactgcttctggattggtataatctggtaaggtgatgctggccgtagtaaccactaaatcggcatcccgtaaggcttcatcactagtgctgacatcaacgtattgaatgttatccaatgccgccaagacatccatataacctaaataatcttgttcaaccactaaagcaaccttcacacggttagccggacgatactgttgaattaattgtcgcatcaagttatagtacgctttcacaagcgcatctcgattaggttcaaataatcgaaattctggttcagataagagataatcgactgtctgactaacgccagcccgtaatcgttcattgggccgcaataattttaagcgttccattaattgatgtgatgctacggaagtcatatcattacctaacacatgaatattagttgtgaccacaaataaggcattttgtaactcgtgatagactttatctgatatcttcaaatagcgctgaatatcaattggcgtccgttccaaaaaatgacgaacaaaatgataaacttctggtacataacgttcataaaccatacattcagtaatatcaaactgttctttcgattttagcggcatcggtccgtatttcattacaaaatacaacccggccgactcagcacgacactgtgcaggtgataattgcgccaatgttgcccgtaaattaattgaatcttccgtaaaatcagcaaccagataagtattagtcaaatcaggatatggataacgaatcaacgacatccgatcgtcttcttcaataatctttccttgcatcactctataataagaaatcgcgatcatataggtgccaatttcacgcgttaataagttaggctcttctagttgataggccttaactgcacaatcaaacgcatcatgcgccatttgttggtcaacgtcatcaaaaacccatgtatgtccaccagccgcaagccaatataaggtcaccagcgcaatccgaatcgccttttcatcaccttctaagtgaattggatcatacgcaatccgtacattaaaggctcgaattaaatcccgtacctgtttcaagtgccgcaagacggttgccttactactcttgtgcttctcccaaaatgattggaacgacacgttaccaccatgtaataaaatttggacaaaatcataaacatccgaatttttaaccatataaaaatgataggcgtcactcggtaccttaaagagctgccgagcatcatcagtatcggtccctaagaccgcctgcagatcgcccaccatgctcatgtacatattatataaactaccgtagttgcgatctaagagcgccgcaacctgttttaaattcacatcatcaatcaggtaatcaacctgtctggccatactaattcgtttcttaacgggcagttcatcccacttaacgttagtaatatccaagaataatgcgtacttttctttctcagctagcgtcaaataaatactgttcgtatccatctaagtagcacctccagtccaaactaactatcatttaaaatgactgatgagctagaattaattttatattaatttgaatccttttattaccgcaactccattatacccttatctaatacaattaaacattataatcataaataatattttagaatattataataatatatatagtattgataattaacattaagcctcgttaaacatttatcaagcttagtttgctattttttatgacatctagcgtcataaaaacggcaaaaaaagaacttagcatcatcattagattttgctaagttctgattaaaaattttctaaagtgtcagctgccaccccatcggcgcttcgtaaggatctgttgaaatctgataatcatttctatacggtaaatgaagctgtagtgagctctccttaaggggattatcccccatccgtgtttctagactttgcgctgtcgtgtcacgtttcaaaattccatcgatccactcaccatcgctcttatccggcgctaatggtagcggtgctacattattgatattatatttaaaattattagtaatataaaatggattgtgacttgcctcattcgcatctagataggctaattttaaattaaaaccatttaataacggattataaacagttacctttggccctcagccgttccagtatcagcaaccgatttttgggccaattgaatctcgttgatagcaaccgttcttgttgcctcacctgaagaatgacccaaaacatccgtgccaaatgatatcctagccggcacggtcacttcaagagtggccttcacctgcagggtaaaattgaatgttgccgtggtttcaatcttatccgcagcaattgttgccgccttggcatccgccgttgtggcaaattcaatcccgctagttttagtgagcgggtagctaatcttctgtgcctcagttttcacgtctccagttattgccttggtctgatcatttaaatcagccaataaactttcctgatttagctttacagaggtcccagtttgggcaccactggaataacgatgccactcacctttatcgttattaccgttactgttataccgataatataagccatagctgttaggtacattcgatagctttaactcccctgtaattcctagactaggtgcaggcttcaaagccccatcagcataatcaaacttagccgtcccaccactcttaagcgattgagaattcttactaccaggatcatttaaatcgatggaatcgatagtgactttttttgcatcccccccatcatttaaatccggaaattcttggttattaccaaaaacagacttatcatgctctggggatataatcgcattatccaacgtaatattattcgccgcaacgaccccaccaatatatagtccgtgtgtagaactcccggcgtaataagaaccatgagggattaacattgtcccaaataacatcgtacctgggctacggttagtataactaactgcagcggtttgtgccgttaaccctgaattatcctgtttatcttgattaaatgattctgggtagttgtcagcatcgtacgtgtctgtaaaattattcagtaaatgcgaaccaaattttagaacatttggattactccaatcttcatcagatgcacccccaacctctttagcaatactgttaacgtatccaggtttaccaacatctgttgtattcaatggaaatttgaaattatcaacacttccaatatagaggccatctccaggttggaaatcaaatcttttatctccaaaatttttataattaataacaatatatggtattttttctgaatctaatgttttcccatcatctttatagaaactatcagaaaagtgaaactgaatattcatgtgcttagctttttcataattctctgttaatctatttcgatcaatcgaaaccgcaacaatcggcttcttaccatccacttctgtagtatatggcttagttttttctcttgtttcggcactcacagttggatcatccgctttagcaacaatattgataatcacatctgtaacctcaggccacggatcagtaatatagaacggattagatactggtcttgatactttattctcattattaattggatttgtttgttttaaatccataatttcatccgtactagacaaaaaatcagtattttctgggagtaagttagcataaaattgactcacatcctgaatattctgctgtaaactataatctgttgctgttgaacccccacttgtttcgtacttattaatcccattatcaacatactgtggtagtttagctaaattaccgtttataccttctaccattttattcttccaaagaccttcaaaagtcccttgttgccctttgctaaaaccagaaagcgaaaccgacattccagggtatgctgcttcagcatcggctttcgatgtatcagttgcaaactcagtatttttagaaagaccatcttcaactagcggattttgccacataccacctaaatgaaaaactaaatttttcattccttcagttttatcatatattttttcattcccttttgtgaaatcattaataatgactgctggattttttaaattcttaaaatagttatcatatgctgtattcgtactcgattcagttgaatcgttaaatcctgatggaccaatccactgcttcttcaaaataactgaattcgccataattcgaccactgaatggagattcagattgaacaaactgattccccgcgaccatcataaaatttgaggcgccacttaatggatattccgtatcaattcgcgacttattcttaatcaccgtcccagttgcctgaactttttgctgattcacaaaacttatcgttgcaaaacaaccaattactaacgcgattaaaccatattttctttttgtcatatatgttggcccccagtcctaacttccccattaagcgctagaaggcacccccgagttattgtttttctagttctttgatttgcttttcatcttgcttcttacgacgacgataccctaagtaatacgttgtaattaataggatgatgaaaataataattagtataatgattaaccaaatccaccatagatttttattctttcggttcatttgcattgcttggttaacactgatttcaaaatcacgatcgaaaacccaagttttttgactggatttcgcaactaaatgcaagtgatacttcccatgattaatccagctatcaccaagcggaatcccatattcaaagctagagtttgtcgccatcgtgataccctcacgttgatagccaaatagtgtcttagagcctttatgtttcgacactttagcattgatagtcatcgcacctggtgttgctgctcgtacattttccaacttagctaatacggcaggctcatgcagatagtttgtttcactaacccgaatccgccgcagtttcagatttgccggtgtatgtatattaggatgttctcttaacactacacctatcgccattgcataataattttttacactaaaaccttgttggtctgttccttgcgtactacctgcctttgtatctttaaaatacagcgcaccctttagaacgcctgcatagagttgatctggcatctttaccttaaaattaactgtttttgtttctttaggtttcaaagtaatcatttgtggttgatcaaaaagctgactaaattgatattccgcctgtgataatttcccagggttatgcttatcaaaggcctctgttcctgaatcagttgtataaccagtattagctgcggcgctaatcgtttttgtattatcttctagattttcaatcaccactgataatgtttcggtttgatttggcttcataactaaatcaaaactagataaagcctcgttatattgattatcgggaatattagcaattactgtaaagccagcaccggctgcctggaccgtttgcatatccataatcaatggtagcaagaataatcctattaatgacaacattagtatgtgtaattttttcatgcgctctccttcacgaaaaaaagttgggtttccccaacttttttctgatctaatctttaaaatttgataattaagctgttggtaaagttgtttgagcaccatccattaaagtccatgtgataggtgcttgataagttcctgccacaatgttctttaattcgctcaatttaagtgaagataccttatcatcagtagtactaaaatcagcagttgttgtttgagcacctaatttttctggtgtgttttcaagggtcttggcggtattcatgatgacttgtgcatctttaccaatggttgtagtcgttagattatcaacacctttaccaattgtgataacaccggttgcagtcccttcgctctttgtatcgatattcttaaattcaccaagttgtgcgaataatgtccattcactaccagcaccacgataatcactcacttgtaacgtattaacatccttatcaatattaccttgcgtaccgtctgctggtgtagcagtttgtgcatggccatcattatgatgagtgctatcaacagtgttgcttgtttgtaggaggtcatcgttctttaagttattgatagttgttgtatcatcattaccaaaatggaaatcaggtgcagcatccaatgtcaattggccagccttaaccgtaaattcagcagtcgttgttgcttttgctagtgttgctttagtagctaccttatcactaactgttacggcttgtacgcctgcaacgttgatcaatgttgcgcttgctaatgtaactgctgctaataatgcgaattttgtttgtttcattatgaaattccctcaaatagttagttatttaatagtaattaaccctattattcatttacttctttaaggttattctaggtcataaatcctgaaaagacaagtttctcagctattgttaacctcataaagcgcttatcaaattaatagctaaaaaatattgaatagctgctttatttgacgctgttcactatattcaaaattatgtactacgcgtgcatacggttctcaaaatgccgattattcaactttataactgttaatatgcttgagtagctgctggtaaactaacatatttacttattgcaaaaattacataaccactaatatcaacattattattttatttttttgaacccaaattaagcactagcctttcaaaccctttagagacactaacatatctgttatctattcttaaaattttctcactattatgactgttattttattatattacccattcaaatcattgaccttgctaacattagctgacaataactttattaaaaaattttagaaaaaatttttcaactttttttcgaatagatattcaactaggtaaacttttattatactagcattatttttttaatacttattggactgtaccactcctgtaacccgtcaattgtgagaacaatccttttaaagtcccatttgattcagtatactggtagataacagctattcttgggggtacttcaaatgcgaacatggcaaaagactatcattattatcctagcacttatcgcaataccgattatttattttgagaaccagtactttagccatcaacaaaaagaggctcaaattaaaacaagccaaacagcgatcttcaaagcttaccgaatccattccgaaaataattatgccaatttcgccatctacactgatacaaaatcggcaggaaaaatctactattttgtccccaaaaaccaacaaggccacgccattgatctacggcggcaacaacagcgcattggcgaacaactctatcaaaaggcactcaagcagaaacaaaaagatattgttgtttacatcacctacaatggcgacaacttgcacgatgatacctactgcttaacaccgactggggcagtctacagccgtgtcgaacatcatttcagcactaaattcggtaaattcaccgatcaattgggacaagaagcggtttataacctcgctaaccaaacacaccccgtgacctttaaagacttatatcatgatgccgctaccctaccaatgattaaacaactcgctgttgatcaacaacttaaaaaatacaactacacgccccaccaattaaaaaccttggagaatcttgattttccaactgacgtcaattatcaacagttctctttttcacagcacgggttaacgctaaacttttcaaaaaacacgctgggaatcaaacagatcacattgccactagcgacaatcggtccttatctaaatcccgactatatcgctgaaggctacacaatgccaagcgccaagaagaaatccaaatcagttgccctcactttcaatacggctcttgatacggacagtgccaagcaagtccttgaaattctcaatgaaaaagcggcacaggccacgttcttccccaccggtgaagcagcccacaaacatcctaaaacactcaaaaaaataagcgcggctaatcaagcaattggtaatcaaagttacgctgccgatgatgcaatcgatacaatgagcgaagctgacttatcagcaaatcttgccaaaacagatcaagcgattttcaaagcaactggcgcactaccacgattcatgcgcgtaacccctgataccaccaataaggccattgcgagtgccagccaacgcgcgttgattagttggtcggttgactcagaagattggcgcactgatattaaagctactgatattaccaaaaacgttattgagcgcacaactggcggtgacgtcattctacttagaactgcgcctgaaacaatcaaagctttgccagctctcatcgatcaattgcgagccaaaggttatcacttagtaacaattccatcattatttgaacaccgtctagcacctttccaacagtacgctaaggccgctgatccttatcaagattaaaaaaaagaaccccgagacgactgtctcggggttcttttttttaatcagtattatcgacaactttatcagccgttgataattcccaagttgcttccaacttatatttgcctgggcgtttagcacattgatctaccttgccattatggaatttcaagttaacgtcgctcttataaaacggcattgacttggccggttgtatggcgtctaactgctcatctcccgacaactgtttttgtgtatccagtgttaacaatggggtttctggtccttttaataaaccacctaaatttaaaatctggcccgcttcccaatcatcatccgtccccgttttcaacgagtacaattggacgttaaagccggtcgcatcctcttgcaacaatggattatcgacgagatccgcacctgaagtgctgttcttaacaactaatttccagtccatataaaatggattttcaacgttaatttgccccttagcaatgctgaccggttcttgttcagaggtgcctagtgtataggtcccaaaatcaaatacctttggatagttaaccaacaaatcaccatgaacattcaaggtgtaattagtaattgtattatcatactttgccttaatttcacttgccgtcatcgtcgacaaatcatcagaggcactagccacaataaacgaaaatttattcttatgcagtaaatgccaaccgataaaggccttttcgacgccattaaccacataattaccatcaatcttgccggcattataaatggtttgatcatcgtaattatcaacattatccttcgtctttaaatcttccgtgacgtcggcaatcgataattcgactgtctgagcttcactcgtcttattgggttgcaacggatttttaccgtccggctcatactttttccacttaccatcattcatccgcgaccataacacattgctggtcccagctggttgatcgattaaaaaggtgtttttaaaagcacgcccatccaaacgatgcatcgtttctgattccggatcgatttcaacgttattatttagtgaaaattggaaaacataattcgtcgtgacattttcaggactaaagttaacgccgttgggcagggtcacggacaaaatccgcggcactttggtcgttgattccaaatcagaagtccctgggaatttaccatcggcattaaagttcgccccaaacgccttatcaactgccacgttcccgtccagataaatactccgattcgtaataacattcccagcaaaactatactgagaacccccttgaataatgatgttggtatggggggctaaaatcgtcccaataaatgaataattttcttccgaaccacgattagaattcaacgtaatcgcagcgtcgtcaccaccattaatcgtattaaagttgttcatcacatgcgccgctgaattataacggaccttggtattatcggccggcgttaaatccaatcgagcattatactgtgctgttgtttgtggataatatttattatccaccggcgcattggccttaacctgtgccggtgtgtacgcccgcatactatacgttgagctggcactaaaattgaaagtcttaaaattatggaaattaaagataatatacggaatcttttgtttacccgccgtatagttcaataaattaatggaaatcccttccgctttttggaagaggccatcattagcagcaccatcaatatcaacaactgcgacaccaacatccgtacttgttgtatccatatcaatattaacttgaataacatttccgtttaaatcaacaccaagtgaactaccattaacggcttttgaattaagattaattgacttgattgcatcagaatgaacgtcacccttgtaaccagtgatattcccatcagcatcctattctgtcgccgtcaaattggcgtagtaatcactcacgttggtgacattactaatcgcttgagcttgggtactaactttattgtctttgaaatagtcaatatcccctaaataagcttttttgccattcaatcgataggcccgattcttgaaagctttcaccttattatcatcattcagaatactttttagttggctatctgggatatcatcgttagcagaagtccccatcacgtaatgccctacctctttattcttgccgaccatactatcgtctcgggcgacaatcttcgtaaaagattttgaaaaagcagtcgctgaaacaagggatggatctaagttggttggtagatcaatcttcgcatccgtaaaattattaaccttcgaacttggatactcattcttatcttcagtatcgttaacagaagtcccaactaaaaaatgcccggcataaaattcgccttgcatgttctgcgtattattaccattcataaccatattttcgccggcaaagattgtcgcgtcgctggcaacccctaatggataacgttggctaggccgttcgattgttttattcccaattcgaatcaacccactgttattggtcgccgccatacttttttgtagcggcattaagcaaatcataaaactaagtactaataaaggctttaatatcgtcgttatatttattttcatattgttcctcaattaaattctcaacgacgtcaactagtttcatagtatacgacagtacgtgtatagtcaacaatataaattgttatagactttatactttatcttttcattttagtgtggcattattttaattctagagagagatattatgaaagaaggcactattttgaataaattggtaaaaatattaacagtatcatcagcaacacttatggggattgtcgggctaagccaactaacacctgttcacgccgcagatacaacggctaaatcagcgggaacccttgaaattaaagacgggacacaaactttaacaagcgttgaaagtcttgattttggcgacgttgcatacgacgcaaacggcatgtcagtgcctttgaaaaagactggtgaaaaagccatcgtgaaagatacaacattttcacaagcagcttggacaatttctggtcaaacagattcaacggtcgctgatttaacaatcaatggtcaattattgtcagcagcacctgctgccgttttccataaagctgatgaagcaacattcggcgaacaaactgcaactgtcgaaaatgcgacaatggcattatctgctagtcaagcaactacgaatggtacaaaagcaatcagcatagatgttaactggacgcttacacctacaactcaaagtgctaaattcaactaatcacaaataattcatgaaaggtcgggacaattttttgtcacgccttttttaataccccactgaaaggacggttctatgaaaaaatcacttcgatttttcctcccattattactagcgctcttcttcttagcccctacaaaagcttgggcggacacggctaatttttcaattgaaaaggtcgacacccccgaacaaactaaagaagctgatttctatgacattttagccgaacctaatcaaaatacgcacctcatcgctaatatcacaaacgccagcgaccaacaatcgacatacaccgttacactccgtaacagtgtcactaacaatagtggccaaatcgcctatgtgccaaatacaaaaaatactagcggccaaacactcaaccaattgagtccgaccgccgttaaggtgacggtccccgctaacagcaaaaaagatgtgacgtttcccatcaaaatgcctgcaacagcgtattccgggattattctaggcgccattcacgttgaaaaagagacagcacaacaaaaacaaacaaccaagaaaacccaaattattaatcattacgggattgaaattccggtcgttgttcgtaccacaccttcttcaacaccagacaccaaactgcaactaaaaaaggtgactgctggtttggacacgaataaacattctgccgtactggcaaccctttataacgaaagcaattgggtcctaacgccgcttaaagtagacgctaaggtttaccgcaagtcaaaccacaaactactttacagcagccataaaaaaggcctcgagatggcccccaattcaagtttcaattatgctatcgaacctggtgatgaaccgctcaaagcaggtacttacacactagacatgacggctaaatcagataagaaaacttggcattttagcagcgagtttacaatcaaacgagcaacacccaaagaaaacgccaaaaatgaattgaaatcaccagaaaagaagaaaagtattaacatcatctggctgattgttggcttcagtatcttattactcatcctgattattctttacttgctctacaaactacgtcaaaaaacaaaagaacaataataatgaaaaggcgccgagacagttgtctcggcgccttttttattatctaacgatgtctactaaggtctactttttctaatggaataacctttgttttatagcgaatcttgtaataactgtacaaaatgatgaacaacggaatactcatgtaactaatcccgatcgctgtccaatcaaagtgggcaaacgcttgaatatcctggccaataatgacaatcacacagagtaagaaagcaaaaattggcccaaatgggaaccaccgtgcgtggtatttcaattctgacaattgatgaccttgcactttaaaagcgcgtcggaaacgataatgcgaaatcgcgatccctaaccaagcgatgaaaccagtcaaaccactagcagccacaaggaaaagataaatgcgagtgccaaagacactggtcataaaggtcaaagccccaataatcgttgtcccgatcaaagccatgactggaataccgcgtttgtttgtcttggcaaaaatcttagcggcatagccgtcttcggccattgaccacaacattcttgaagaagcatacatccctgaattagcagccgataacactgacgttaaaataactgcgttcataatgctggcagctgatgctaaaccagcacgtttgaagaccaaggtaaagggactaaccgcaatgttggtttcactagcacctaataatgaggggcttgtataaggaattaaacaagcgataacgaagattgataagatgtagaataataaaattcgccagaaaacttgtttgattgcctttgggatactcttttcaggcgtcttcgattccccagcggtgatcccaattaattctgtcccttggaatgagaaaccagcaacaacgaacacactcaacatcattggtaagccaccaacaaatggcgctttcttgatagtaaagttgctaaggccggtccgatgaccacccataataccaaaaatcgttaagacaccaacacctaagaaaataataactgtaataactttgattaatgcaaaccaatattcagtttcaccaaaagatttcacactcgtgatattaatcaagaaaatcaataatagcgcgactaaactaaaaatccagcccggcatatccggtaaccaaaactgcatgactaaggctgcggtactgacgtctacggctaacgtaatcgcccaattaaaccagtaattccaaccaagcgcaaaccctaatgctggatcaacaaaccgcgttgcatacgttgaaaacgaccctgaaactggcaagtaagttgccatttcacccaaactggtcatcaagaagaaaaccataatcccaatgccacaataagcaagtaacgcgccacctggacccgccttggcaattgccgacccacttgtgacgaataaacctgtaccgatactaccacccaacgcaatcatcgatagatgccgcgtctttaactcccgcttcatttcattttctgccatactacttccgctcttttctccattatttcaagaaaatcgcaccaacccgcgaatttagcaaacaaaaaagccttcttgtctgctaaaaacgacaaaaagactataagccttatattaaccgttgatagcgccccgtaacgtttcgttacgacagtccttgatttattcaatcaagtcccaacatcaatttgaataagcaaattgacatttcggcaaattcccctttaattattcctcatcactgcttagtcagttcagaataacgactgatggtttttgcgacctcttatcttgttaaaggtagtatatcgaattaaagcgcatccgtcaacattgggcgcaatgcaaatttcagctaaaaaaagaagatcgcctactggcaatctttccattttaattattattcttcagtcttgtcttgcttatttttccgccataataggaagagtaagaacaagattaagagtaccatgacaccgataatcacgtataaccaccagttactttgtggtaattcaacagctttaccgttgtattttctggcttctttttgtgtgatttcaaaaatccttcgacaatagccactgacccttgttcgagttgactttaatcttaatattataacgaccagccttcagtggttggttttttaaatcaatcccgtaatcaaaattcgagttgggtgccatctgtaaatcagtttgcttgctgtgataaagcaccttactttgtccagcacggcgaatcttagcgtcgacttgcatctcaccaattgagtttgcttttgtattttgaatatttgataaaatcgcagtgtgcccgttcaacaagccaggtttaatccgatttaaccgcaaatgtggtttcacagtttgatcggattgcgttaacttaacgcctaagatataagaatagcggttcgtcaaagacgtgcccttcttatgatctaaagcttgttcaacttgatcttgcttaacttgtgagacataaaacccgcctaaaatggtaccttcaaaagtcgctttaggtgcattcaaggtaaaagttgctgtccgactactttcagcaggcaccttcaagcgttgcgctggcgacatcaatttagtaaatgggtattttaacgttttatcgtacttaggatcggattgactgtaatcaatcaccccattttgattggtaattgccgtatttggtgcgacatctacttcaaggtcttttttcccagtattttggacgacgaccgatacttcctctttttgaccaggtttcacgcccaaatcgtaatagcctaaattcttatccgtttgattttccggataaatcggtgcaactgagtaagttaccttttcggcatgaacaacctgttgattgacagtaaatgccacaaacaacgttgccagcacgcccatcactaatccaagccattttttaaagtgtgtcattttctaatctcctctatcttaaggggccggtgtattacctaatgtccaatcaatggtccctgtgtaatcacccgcataggccccagcattcacttttaacaatatcccttgattatcatcccacttaatcggcgtaatgtcatcatctgatgttgttgttttagaagcaattctttgagggatttcggtgacgtctgttgatttttgaccatcaacataaactagaccaccatctaactgtttgtgatctgtcgtccgtgtcaagcctgttgagctggcatataaatcccaccgcgaaccggtaccacgtgtatcagccacggttggtgcccaatcagtattatcacgtttattaatcgtatttttgccaaccgttactggcgcaaatccaatttcatttttaaccttatctaatagaagggtaccaccttttagtttaaagtagattgtcattactgtcgatttttcgttgtacccagcgttggtcatataaagcgttaatttatgggtgtcgttcaacgataaaccaaccgtcggaatcccactgactaacttaggaccgacattattttgcgcgatggtcttttctgcaccatcgtcaattgcataatgtaatgtcccaagcgcgtgactatcaatcttaccagtcgctgatgattgtgaccaagagcctgttaaagcaattggttgattcttatcaagcgcaattggtttttcctttgttgggtcagtccactttttatctaagacaagcttagggagacttgtgacgtaaacggccttttctgtcgattcacgggccatcttaccatctaaactgatttcatagttccgacctaaattggtcgtcccatcagttggggttgggtcaaaagcggttagcgtaaactgaatcttagacgtgctatttttggtaacgtcacccatattaaccccagtactaaaggtatttttccctatcgtaccaaagaagtcattttctgtcgcatcgtgcggtgtcagtgtattaccgttcaaatcaatagaaggtgttttgaaaagacccgtcgacaccttattcttcgatactaatttattattgatcatcaaatcatcggcaacataggagaccccctgagaagtatccgttccatcagtcttatagcgtacacccacttgtttccaatcagaaccactagtggggtcgttattaattgttagaaccccttttaactcttctagcggtttcgccggattgtccttcgttacttcagcaccaagggcattcccatttttatggtacactttgtaattttgtgacgtaatcggaatattcgatattttttttaaaagccacttggttcaattcgttactcttaccagttttacccgtgaaaccccagtaaacttgcgttgttccaaaaatattattgacaataattggtaccttaacggggtcttgaccatcaaatttataggtcaaagtatgatcggcataactccacttgacattaaactcatgccatttaccatctgatccaggaaattccttaacatcattatgaatcaaatgaattttagaacctattatcccgaaatctttataactactggttaaagccggataattccatgcgatatgatttctaactagtggtttactcgtacccaaaatacctgtcggtgctgaaccccaatcatcattatgtcttgtatcaaactctactgcaaaactcttcttaatagctggactaacatccacactacttacactaccccagacacctaactgctgccctgttccgcctgtttgaattgtattgtaaccacgtggatcagcatgcatcacaaaagccatcccgtcagctgcattactgccactatccccaaagtttaagagcatcgtcgcctcaaaatccttgcttaaatcaatcctgttatccggattagaccaaatagcccccgactgatcgttggcggctggattgatgacagttacaccatcaacaggtaattcactgtcggattcctttagtggtggtgcgaataaattctcaatatttgtaatatgcgctggtactgggtcaattgctgcctttgttgggttaactaccaccaagattcctagcaataaactaatacctagcactaaaaattgtattgttttattaatacgcattgccagtcctccttgagcagcttttctcaaacgactaattaactgttacctcaagtgatttcgactgggaaatcaactgaggtaacagctcattattgagctgttactactattataaccattgtaaaatgctatctcaaattaagggttaattatgcttttggtgttgcggttaatgtccatgttaattgaccagtatagtcaccagcgtatgcgccagctaaaacatggagatttgaaccactaatcttgtagttccagttccctaacccttgatccttaccagctgtgataatatttttagcactatcattcgttaaatcaactgattttgtatccgctacagtgtgcgctgcgttatcagtactgataccactcgcattcttcaatgttaatgttgagttttcaagtgtgtgactgcttgcatctgtgaacggtgttgtaagcgcaacgtcaactgtataaccagcaccagtcccacgcgcatcagcaaccgaaacagtgccatcagctgtttgacccaaatctaatacagaggctgtaatttctttagtgccaaaatctaaatcaggaacagctgttaatttaaccgtatcgctacccgttaattttgcttttacgacagaagtgactttttgaccatctgttgcgatttcatttttaggagcatctgctgcgaaagccgtttgccctgaaatcattgctgcacctgctactgtcactaaaccgcttaataataatgtactaatcttcatcacaaagacctctattctttaatttttcttttatcatctaattaacatcatcaaaaaattcagcgttctcaccatctaacccgttgaagagtaacgctattaaccttttcgggattagtatatcacccccgtaatcgattttaaacaacttattttcaaaaacatttaataatataatcatttattaaataaagtataagtaatatccactatctaaaaattagtgaaaatcagaaatacttatatatcaacaaccgtcacctgattagtgaaaattaattttcattattttttgtaatttcagcaaataataatattttattttaaaataattggacaatcgagcttatctcagcaactcaaatcactaaattttctgttaaaaagacaaaaaaacaggctagaagaagggttcttctagcctgttttaacttagtaagtcagtttactttagatttttaataatcttttgaattaataattcacgttgttcagccgattggttccaatcaataaccggaatatcgggatgccccatcgtttcgataattaaaccggagacagtttgttttttcaattcattggcccacaacatgtccgctttatgaaaagcagcattaataatcaatgtcccttgtttagccactggttgaaaatcattaaagactgtatctaacttaccggtatctggatacgacttaatctgaccttcagttgccaagacaacatcgtaaattgatacttcactggcaggtcttgctagggtaaagccaccactattccctgaaacagattttacaagaccggccactactaacttacgaataattttccgtaagtaagtttgtgaaccacccagacgatgatgaatcacttctgacgaaatcgtatgttcaggatcttgggttgccaataacacaataatgcacgttgcttgttcaaatgctcgtgtcagttgcatattagtctatctccttttaacaaacgtccctgaagcctcacctggggccgcttttacttcaaatccatatttagttaaaatgtgttcgactttgttgaaactctcgcgatcaaacgtactgatattgccatcgattgtttcaatttctaatttgttggctaagttacaaaaggccttaactgccaattgcgccaatcctaagttttggtaatcataaactgctaagcgtgaagctgcacccaatgtttctaaaacagtgatgtgcatttcatttttccatttgttggtttcaaacaagagttgtgcttgaaaatcaactattgaatgtccaaatttatcaacattcgcatatggtgtatacacaaaaattgagttcgttgattctcgctgaccaccttcacgatagtccgtatagacaacatactgtttaaccccatcatcgctggtttgattcatgctagataaaattgttaactttgaatctgcctcgatttgcgctaattttcttgcaaaggcttgatcattttcacttgccatctgataacccccatttgtctttcaatcccgattataccacaggttttccaatttaaccgcgctttttaaagggttctcatttcaattgtgatttttttatcgaaatcctttttcgcctaaattatattggtaatattgcactaactcgccccctaaatagtcaggaagctgcgtttgataagcagtggtaaagcccactttttgtaaacaacgagctgatttttgattggtaataaaacaagccgccataaacttcgtaatatgcaggtcatcatgataagcattcataaccgcagataatgagcttgtcatcaggccctgtcgctggtattgcggcaaaatcgcaaaacttagttcgtacgattcaacagtgacatcatcttgcgctaggtttggtgccaacatcattagcccacaaaccgcatctgcctttttagacacaattgcccatgaatgttcatcagactggagcatcgtcaaaaaagattgcgcttcatgctcagagtgaaacggcggcatattgagttgcttcgcaatttctttttcgcaaccaatttggtagaccactgctaaatcgctagcgataaaatgtcttaattgtacggcttctgtttgaatattcaaccgatcctctccttttgaaattcctaccttttatcatacgttacttacttgtttccgccaagccgttttttatatttgtcttaagaacaagcatattaattgtggtagaccactaaatattttataattgtagccatcaattcctattgttagaaagatggtgttcgtatggcgttacgtgattactttcatttattctcaaccgttccagaacaatcagaatcttacgattacatccttcattttctagggacgaccattccggatttgcgcgattatcccgatttaaccaaaatttgtgattgggctgcttacgacgatcacagttttagaatctggaccagtttacctttggatgaattcgaacaaaaattggcgcaattaacaccgctaaacgaaagagattaccaaattgattacagctataattttaaggatattaatttcttctaaaatttacgcttgacttttagtcgttcctgccgtaaattgattaacaatcatacaagtcatctcattcaaaccaagtaatgctttatctgtgtgtcaggaagtcggtggttgctgcgaaccgaccagggtaaatgtcgtgaaatactgaatgaagacttcggctaattaacaggaccgttatcccctgtaagagtggcgtgttggcttaaattggcgcgctaaatgggtggtaccgcggtttccaatcgtccctattcgcagatgcgagtagggactttttttatgcaaaatactattgaaaaccactttcaatagcacgtttcaactaattttaactaaagggaggttttttcatgttaaagcatcttgcatgtggtggtattcttcgttatcagtcctatgacgcacaacttcagataaaacttaaaaaggatgcgttaatatgtcaaaaaaatcaattagtctattcgaagcaacattagtccttgtcattctcctggccattatggggaccggcgttattattttccaactttctcctcaaaccccggtcctcactgggattgccctgctgatgttatgggcgcggtggcggcattttagttggggtacgattcatgaaggaattgaggaaggtttaaaaagtggtctaattcccatcattattttcattctcgtcggtgccttgatcagtacttggattgccgctggtgtcattcccagtttaatggtttggggcttccagatggtcaatgtccactggtttattccatccattttcgtcgtttgtgccctcgtggggagtgccattgggagtgcctttaccgttatttcaacagtcgggattgcctttttcggcattggtgccacactgggattagataccacgatcgtcgcagctgccattatttccggggcaatatttggtgataaatcttcacccctctctcaatcaactaatttaacggctgccgttactgaaacagatctctttgcccacatcaaaaacttaatgtggacaaccgtaccagcttttgtcggttcattagtgctatacgcgattatcaggcatacatctcgtgatattccattgaccaaaatcagtacaacagttgccattttaaaggcccataccgacgttagtctccgggccttactacccattattttaatttttgtctgtgcgcgttttaaaatgccagccattccaacgttatttttaaacatcgccgtttcgatcggtttaatttttagccatcatccctacacttcttttaaaacaattgccaacttgattgaaaatggcttcgtcgctcatactggcaatcaaagtatcgatgcacttctcacacgtggcggtattaatagcatgttgagcacagtggccttaattatcatgacgttgaccctaggtggtctattgatgaaactcggtttaatcgaacgcgtgatggcccccctggcgacccacctcaaaacccctggtcaattgatcagcgcggtgattacttctgggattggcgttaacctctttatcggtgaagaattcctttctgttatcctgccaggtaaagcttttaaatcaacgtttgaaaaatcagatcttagcaacttggcgcttggccgcgcactcgaagatggcgggaccgttattaactacttagtcccttggggcgttgccggcgttttcgccgctaacaccctcggcgtaccaacactaagctacctgccattttgtttcttcagtatcctctcaccaatcttctcaatcttgagtagttttacagggattggcctcaaaaagaaaagtgttactaattaagcaaaataaaagaggttgcgacaaaagtaatttttgtcgcaacctcttttttgaattcaaaattttatacctgaaacgtgctttttgaaactgccgtctgtgcttagcataactcggcggataactgctgacagcagttatccgccgagttatgctaatgctcaaagccaaaccgtttcaaacacactctttttcaaacgtgctctttcaggtatattgttgcagttagcaacgccccgcaaacaatcgactgcgtcgcttattcacgtgcctaggctaagccgctacaatataaccacctgaaacgcactctttttagaaaagattcatcaagaattgcccgccgtaaactagtgcaaagctataggctgcaattgatgctggtttgcataagatgataatccatgtgaattttttaaatgacatttcggttaagccagccattaaacataagacatcatcgggcgcaactggtaggaaaatcgctaaggcgaaaaagcgcgcaaagtttttcttttccgtaatcgtaccgatatatttatcataagttttctcgttgatgacgtggagaataaatggtttcccaaactggcgcgccagcaggaaattaaaaattgacccaatcgcaatcccgacatagttatagataaagccccataacgggccaaaaactagaacacctgcggcggtactaatcccgcccggaatcaccggaatcacaacctggataatctgaatcgtgatgaaaataatcgggccgatgagtacggagtggcccaagtacgcttgtaaggctgttgtgttgttaaaaagccctagtcgtgaccagtaaatggctaatgcaatgctcccaattagggccatcagagaagtcgtactaattaaacgtcttgaaattgttctgctcatccgccgaattcctttccctcgataatgtatctttaatttaccacaatttaaattccgagtagtccgccgatagtctgatttaagaaatcttaactttttagtcgctcatcctaaaaatgtccgaaaaggttttaatccttgtgcgcgatatttttcaacaaactgagcaactgccttaggatcctgagtttgatcatcgattaccaattgttccactggcaatggccgttcgttagcaattttgacatcaatcacaactggtccttggcgtttttgagctgctgcaaaagcagccttcaattcatctaacgtccggactgtaaagccttgggcccctaatgctgttgcggcggcaccgtaatctgcaccctgaatggcaacaccagaatgtggttgtcccttgtcatcttgttctgcttcaataaagccaaatgaatcattactcaacacaacgttgataattggcatttggtatttaacttgcgtaatcaaatcttgcatcaccatcgtgaagccaccgtcaccactgattgaccaaacttgccgattagggaaggctgcttgcgttccgattgcagctggtaaagcagcccccatcgttgcgtaccaagctgagatcgtcgtcttttgacctggtttcatcttcaagaagcggacgccatcaatcgtgacattccccacatctaagttgaaaatcgcgtcattggtagccatttgattgatttctttaaagactggttccacccgtaatggtgtttgtggatcatcttcaaaactagcggtccattgatcccagttagctttattagcgactgctgcacggtagaaagctgtcttttcagataccggttcactagcttcaagtaaagctgctaacgctgtcttagcatctgctaaaatgccaacgtcaacatggtgtctatggccaagtttggttggatcaatatcgatttggatgaacttcgcatctggtttgaagaaatattgaccaaattcgtagttactgccgacaaatagaattaaatcggccgcttctgccaaatcaacacctggtttagtggccacccgccctgctgaaaccatgtaagccgggttttcgtcagcgacgatccctttagagagggctgatgacatcattgggatacttaatttatcagataacgccactaattcgtcgccggctgccttagcaccttgaccaaaataaataatgggttgtttagcttctttaattaattgtaaagtctgttgaatatccgttgagcgaggttctggataattccccatctggaataggttagcagttgcttcgaagtgatcttcaattggttgccagcctaggtccgttggaattgtcacaaccgccacaccactatttttataggcttgttgaatcgcttggtcaacaactagtggtaattgttctgccgtcataacagtccggttgtagactgctacatccgcgaacattggattttcattcatttcttggaaataatcagtattcatgacaccagttgctacttgaccaactagtgctaaaacaggaacgtgatcatacttagcatcataaagcccgttcaataaatgaaccgccccagggccagctgacccgaatgtggccgcgattttaccagttgccttcgcttcaccagaagcagcaagcgcccctacttcttcgtgacgaacttgaatataacgcataattgctttttgattatgcaatgcattcatcgttgaatcaaatgagccgccaggtaacccaaaaatatggtcaataccccagtctgccatgacttttaacattgcgtctgccgcatttatcttttgtgttaccatctaaaaaggcctcctgattaattttattccgcttattttaagtataccgccttaattgtaagcgttacaaatgataagcattttttagccgttttgactggtaacgaatcatcttctttggtatgcttacatcaagctagataataatgattattaataagtggtcattaactttagattttagggaggcttttttaatggctattattgctaaagatgcacaagatgtttttaaagatgcgggcgaaaatattattttttcaacacttaatttaaatcgccaggatttctcatcagacagagctgccgtttccgatttggctgaacggattcccgcaattatcaatagtatgaacatccgctatccggatgcccatttacgcgttgcttttgggattggctcagatgcttgggactatcttttcccaaacgcccctaaacctcaagaactagaacccttccaaatgattcctagtcctaaacacgatgctgtcgctaccggcggtgatttattctttcacattcgggccaaagaaatggctgtttgttacgaagtaatggcgcaattcatgcaattcatcggtcaaaacgcaacaacgattgatgaaacccacggattccgttatttcgaaggccgctcaatcatcggctttatcgacggtacggaaaatcccgctatcgatgaaacggccgaatatgcccttgtcggcgacgaagaccctgaatttatcaatggttcatacgcctttgcccaaaaatatattcattcgatggacacttggaaccacacctcaactgaagaacaagaaaaaacaatcggtcgtaaaaaattctctgatcttgaattagacgatgccgaaaaaccaacaaacgcgcacaacgttgtttcgcaagataacgaaggtggcgtcgaacataaaattgtccggatgaacgtgccttacgctaatcctggtgaaaagatgactgggacttattttatcggctacgctcgtcaatggacaatcgttaaacgcatgctcactaacatgttcgtcggcaaaccagccggcaactacgatcacctactagatttcagcgaaccaacaaccggcgcactattcttcatcccatccaaaacactactagcaaaaattgcggaagaagaaatttagagtgcgtttaaagcgatttgacgctgagcattagctgagtgttgggaataatcgccagcggcggttatttgcaatacggtgctaagcacaagcgtcggctttaaaaagcacgtttcaatttagagtgctgcatcgaacgctttggctttgaggattaacgtaaaaatgggcatgatggtattttttccatcatgcccattttgtagttaaccggaaaaggcagttcgataaagcacgtttgacctaagtttaaagcggtttgacgctgagcattagctgagtgttgggaataatcgccaatcttaaaaagccgacgaacgtcggctttttaattgctttttgttgacttcccgcataccgattgctaaactgatgttacttactttaaataagaaaacgatgaggtgttttaaatgtcagatactatgcaagctgttgcgatcaaccaatacggcgatgaacaaacacttgaaatgattactttaccaatgccaaccattggcgaacaccaagtactaattaaatcaaaagcaactgctatcaatccacttgactggaaattacgtgcaggttatctcacaagcatgttcgattgggcttttccaatcgtacttggttgggatttagccggtatcgttactgaagtcggttcagctgtaacagattggcaagtcggcgacgaagtttttgcacgtccagccacttctaatcgcggtacttatgctgaatatgttgctgttgatgacgaattaatcgctcgcaaacctaagaacgtcacttttgaagaagccgctgctgtgccattggccggcgaaaccgcttggcaagcccttttcaaccatggtcacttaaaagccggtgaaacagtgctcgtccaagctggttctggtggtgttgggtcatatgccattcaattcgctaaggcaatgggcgcccacgttatcacaacaactagtgccaagaattttgatctcgttcgcgacttaggtgccggcgaaattatcgattaccgtaacgaaaaagttgctgataaagcacacaacgttgacctggtcatcgatacaatcggtgggcaaagccaagttgatgcttggtccgtgctcaatcctgaaacaggtcgccaaatttcaattgttggtgaagcacccgaaacagctgacattatcaaagacacaaagatgactttcaaagcaatctggttaattccaaatggtgaacaacttcgtgaaattgctgacctaatggctgacggtaaagtaaaatcaattattgatactgtcctcccattctcagcggaaggcttaatcaaatcacatcaactaagtgcaacacaccattcaactggtaaaatcgtcattaaattctaaataatacaaaaaagcatcgccaagttggcgatgctttttttaatcgtgaaagagtttatcactatcagaacccgttcgattgccaatcacaaatacttctaagatcacaaaaatcaattcgattgccgggaagaaataaatcgcaacaatcaaggccacctggatcacccagaaataaggcttcataataaccccgtaaatcggcatccctgtaatcttttgataaacctccggtgcaacttcgcggttggcatccgctagtgcgcgactcaataggaaatacatcatcaaccaagcaaaatgaaccacatagtagaaatattctgggccccgtgaattaataaaccgccccgcccaagcagtagcaacgggtaaaaatgacattgataataaccatatattgttcaaccaataaattcgtttcgtcacccgtttcgttaaactaaacatgtagtggtgattataccaagcaacccctacgaagagataggttacgatataggcaaagaagtatggtgcattttccagtaaggccttcatctcagccgtttctggtgttttaaattcaagaatcataatcgttacaataatcgcaatgactgcatcgctgaaagcttccaagcgtcccttattcaatagaatccctcccaaatattaatagccgttttatgtttcacactattagttagcacccttatcattttaccgccattaaaaggatttgtcacgacctccctggaataatcaaccatgttaatcgatttatattgatttccccctttaactaatagtataataacttaaactttaggggggatttacaaatggataaaacatacaaatcaagcgctgaattaaagtgcgaggctaaggcactctatgcgggacattggggccaagcaatcaagcttaatatcgtttttcaattctcgcttttatcttaattggtggcctctttatggcactcactgcactcttcatgacatcggactttgtctcatcaggctctggctcatttcctagcaatatgtcttctggtaattcgttgaccggtaatattggtggcttcatcgttggtttaattactttggggatttcatttacgacgctcgattggatccgatcaaaagatgccgattttaacgcttttagtggtgcttttagcgtcttttcaaaacgttattttgtcggagctgtcattaccgaactattagccggctttttcaccgtcttatggacattactcttcatcatccctgggctgattaagtcattttcttattctcaagcgcctttcatcttcaaagatttaacggacgctcacccagaagccgatatcaattacctcgattgcattacaaaaagtcgtgaattgatggacggtcacaaatttagattcttcatcttaaaattaagtttcctaggttgggatatcctggccggctttaccttggggattggctatatttggttaaacccttataaacaagcagcttacatgggcttttacgccgacttagtggactagcatactgaaaggattggcgattgccaatccttttttgttacccttaatgaccgaaacggctaaaatagagaagaaaggatgtggcatcattgatttcaaacacacagatcaccctagattctcaccaaaattggcaaactgttactactcagattccaacacctggcgaccacgaattactcatcaaagtccaagccgccgcagttaatcctattgatctcaaacggcgcgccgttacaacgcatattttaggctacgatggttacggcgaagtcctagcaattggcaaaaccgtcacgcaatttaaagttggtgatatcgtctattacgccggttctactcaactagacggcagttttcaagcctaccaatgtatgaccgaagctctctgcgcactcgcccccgaccaattatcagcgagtgaagcggccggcctgccgctagtctcattaactgcctacgaactactttttgaaaaatttcatttcgaggctgcagaacaagcccacctcggtaaaaaccttttgattattaacggtgctggtggggtcggctcaattatgagtcaactcgccaaatggactgggttcaccgtttatgccactagcagtcctcaaaattttaactggctaaaagctaatggcgtcgattatcctgttgattaccaccaaacaagtgaccagcttaacctcgatcaactgccagccgaccacttcgacgcgattgccgttctttacgatgtcgcaccctatttatctgccgcaacacgcttaatcaaaccactcggtcatgtcggctcgctggttaatatgcaagccccacttgatttaaccccactgaaagcaaaatcagtcacatttgattgggaatatatgtttactaaaacagattttgattacgagattgccagccaaggcgcaatcctcaaaaaaatagcgcgcctcgccgacactaatcaaattcactcgattacgacgcaagtctaccaaggcttatcggttgaaaacctcgacacaatcacaaccgaacttacaaaaggccacgcaattggcaagtatgtgctaacctactaaaaagccatatttaattttaaaacgttgaataatccgataccacgattgataaaaacaataaataaagaacacgttcgatagtgcatgggctagatcgaaataaaaactcgcaatataggctgcgatgaatgttttgagcgataagggattaacataggcgataaaataccataagttcattacccacccaaaaataaaaccccaaataaagccgaataggcaaagccaatatttattgtgggcccaatcaaagcggctaatcagcccggctgtcacgcccatcatcccccaacaaaacatctgccacggtgtccacggcccttgacctaagaagaaattcgaaaccaaggccgccgttgaaccaatcatgaagccagcttccggacccaaaaccaaagctgcgacaatcaccacgaaacttgttggttgaacactcggtagcggcgcaaaagggacccggctgaccgccgcaatcgtcgctaaaacggcaatcatcacaatttcacgggcccgaatttgacgtttttcaaagcgccaataaaatggcagcatactgaccactaaacaaataaaactcaacgctaaaaaatactgtccctgtaattggatgattaagcctaataaaaccgcgattattaaaaaggcaatcccaaaaataaggctactttgccagtcaatgcgcttcatcggccaacctcttcccaagtcaacgccgcagagtcttgtggtcgtaagagtcgattaatcggggtggtgtaaaagaagttcgattggaaaaattggtgcggtgcttcttgcgcaacaatcgcgccatcaaataacaaagcgcattggttcgcaaagcgagcgctaaagaccatatcatgactagccatgataatcgttaatccttctacttgtaactgctgtaataggtgtccaagtgcttgtttacgcaatggatctaagccttttgtcggctcatctaaaatcagcaacttcggattagctaataaaataatccctagcgcaatcaattgctgttcaccaccactagtatcttgcggatcactgtctgctaaagcagttaggcctaacttggccagcatcgctgtggccgcttcctctggatgttcacgcccgagttgaacggcacgccgctcaaattcaacccggacactctccgcgctaaactggtcagccggttgttgagacaaataaccgatcactttaaataactgctctgtcggccacttttgtagcggtcgttccaacaagcggaccgttccgcgacggggttccaacaaaccaatcaatacttttaaaagtgtcgacttaccaatcccatttttaccgacaatcgctaaccaatcacccgtatggaccgttaatttgagctgattcaaaacatacggctcatttttggtatattgaaaatctaaatggtcagctgttaataatgtttcttgcatcccggctactaccggacgtaattgatcatgaatactgccgactggcaattgacgttgcccggccacaactgttagtggcacggattcagtctcagtggttagttgttgttgccaaaaaagccgcggaatctccggcatgaaatcccgtaaagttggttgctgccaaattgcctgtagaccttgatcaactggtccttgataactgatgcagccgtttgtcattaaccagagttgattggccaacggtaacacatcatccaactgatgctcactcatgataatcgttatacccaattcatcatgcacgcgttgtaataagctcataaactctttggtcgcaatcggatctaattgggcagtcggttcatctaacaccaataggctcggttggagaatcaaaattgctgccagattaaccagttgcttttgcccgccagataattcatggacagatgcgtataaaatatcctgaatgccaagaaaactaacgagttctgcaattcttttttgaatattggcactggcttcgccgctattttccagtgaaaaggccaactcctgaatcacggtatccattacgagttggttctcgggattttggaaaacaaagccgattttctgcgcactaacagctgggtcaagatccgccaatagtcggccattaaacgacacctgtcccaaacgctgtcccaccggccataattcccgtttaaattgacgcaataaagttgttttaccactacctgaagggccggccacaacgacccaatcaccagcattaaccgtcagattaatcccggccaagctcggctgatttgctaatgcatattgaaattgaagctgttctatctgtgcaattgccaccataagtactcccatccttccaataataatggtaacccatcaatcaacaaaatcacgcttagacacacccaatcacggctggttaaccgcaatgtacctagtgttggataaacgattaactgcccgttaccctgactggcgcaccaaaaggcgaataggccaccgctaatgagcgccatcaataggccataatcgcgatgcgtcatttgataacggcgatacgtacttcttttttgaacaccaaagccgcgggccgtcattgaatcggcggtctgcagtgcttcagtcagtgtattggttaataaaattgccaacagatgcatccctgcttgggcgcggttttttagccgccccgttaccatttgaatccctcgcgttcgttgcaccgccgtaatatcgcgtaaacgccgaatgaataatggaaaaaagcgcatcgtcatcatcgtcagtaacgtcaattgcggggcgattccgccaaataacgccaaaaatttatgattggtcatatgctgattataagtcacaaaaatcaataataaaacggccaaagcggtcgccattaaaaaaccatagaccaccgcttccgccgttatcagggtaccgccaaccgtcatcataacgtgcgtcccgtgattattgataattggattcatgatgacaatcaggaccatcatcaataaggcaccttgcagcgtgctaactgttttctgttgatttttggcgacccaattaaccgcaataataacgatcagttggccacataaaaaataggggtgattgaaacacatcgaaaagctaatcattaatatgaagtacaccaataaaaccagtgggtgtaattgatcaataatcagttgcgactttagccctgaggcgcgtggcgatcgtgtccgagatcttccgtatacagccaatcaataacatctccactcttcacatgatagacaccacacgattgatttgaaaaaacgccgttgacccgatagagccaaccactctgggggcccttatcgaattcaaacaagccattaatccctttgacataggcactagcaccaatcccacggtaagatagcggcatgccttgttggcccgttagccgttttaaaacggccagcactgtctcaccatcatcaatcgttaacgaagcatgattaattagggctgcattgccttcactaatcggcccgtaaacacttaacgttaccttcttggcagctggttcaggttgtttggctggtgcttcgtgagacacagcatgctgtgttgattgttgcgctgttgaaactaccgcgctgcttgctgattgacgtgttgttgttggtggtgtagccgtcgttgctgactgtgaggttgacgtttgtttagctgacgcgcttgcctgttgttcttttttagcaacactggcttgttcagactgactaacctgcttggcttctttagattgtgcctgcttagaagcgacagaacgcttcgtctctttagccttaatcttagtagtcgtcttttttgaagtcgattcggcgtgcttggtgaccgccttgtgcgcaactttttttgattgcgtcgattgctcacttgcctgtttaaccgcggttggttgctgttgaacactcgcataggtcccgtagccgattccgcctagtaacacgagacctgcaacgcttagtagtaggcgctttttaaccatctagttgcctcctagcgttgttttaaacgacgtatttggtaacctgcaacaccaagtaacatgaataacccagctaaaacactaccccaaacagattgatgacccgtttgtggtaaagcatcttgcgtcgcagttgtgccagtcaatggcacttcatctgcttcattaatcggttgtttaggtaattgtttatctaaatcaacttctgaagatgatgatgctgacgattcaccggctggctttttgccaggaatacttggctttggagctggcgctggctttggatccggttttggctctgggtccggttctggcaccacttttttaaagttatagattgagcctttacccttcaataaataatcatactggcctaaagcatagaccgcttgttccgttgacattgacagtgcgccatcatcgctgcccatcatccagcggaattgcccgttggctttttggtaagcgattaagttcgtgattggtgtcgcaccattatcaccaacaaaagttgtggctggattgacgccagctgcggctaatcctaagatgaccattgccgtgctatttgagttttcttcagttgaaaaaccaccaggaatcaagaaaccgcccgttgctttcacaaaaccagttgtttttaataaggcaactgcgcgatccaaagcgctttgaaccttaggttgatcacgatgcatgcctaatgctgacatcgtcatccccgtaatatccaaatcactgactgatccgaaaaaggcccaaccgccagctgtgttttgttgttttaaaactaaatcgattaattgattaatcgtttggttggcttgtgaaccgtaatcttgagtgctaagggcaataatcccatagacttgtcctgtgataccggcagtagccgcttttttaataatttcagcaattaaattaatgccgttgaattgcgttgggtcttcgccaattgcagcgatcccaattgtcagacgttccaagtcggttgcagaataatgaccggccattccggttaattcttcagcaaagacttggtggaacgttgctttttgatcggttgttaattgcgccccagaactaatccgggccaaagccgcccaaacttcagtatcctggctagttgttaactgttgcgccccatgcgccatagccccttgatagtcctgatttaaaacagctttagcagctgattttacaggttgattattggttgcctgggctgttttagcaggtacttctgccacttgtgaacgtgaagacgtcccttgactctgacggcttgtttcaaccaattgattgctagcaacttgactgctagttgattgactagcactgagttgacttgtcgcaactgattgctgaccggtttgaatatctgtcgcatgcgtactcgtcgcactcgtgacagctggtgctaataataataaactcgcccataatccggtatagatttgttttcgtttcatataatattcccctacccctacaaacttaacttttaactagttacttctattttaacaattttttggtgaaagcaacatctttttaaagcactatcattagatggacagattatttttcgtaaaaagagctcattttatgcgtactatcgtcacaatttattcaatatatccgcctaaactgattattattcagtttttataaggaggaaccattatgaactttttcaaacgtgcttggcaaaatatttcattcaaaaaaggccgtagcttattattagtcattgttatgactgttattctagtcttcattatggccgggttactcattagaaacgccgcagtaacaacggttaacaacaccaaacaacaagtcggtgccagtgtcaccttatcggccaaccgtgatcaggccttcaagaaaatgcgctcgtcgacaccaccaacgagcacttctaaaacgaagaaaccatcgctcagcatgccttcggttagcttagccaacgtcaaaaagattgcggcattatccggtgtcgcaaactataacgttagcgttgcaacttctgctaacgcttcttccattgatgcgattagcacctcttcagctagcaacaatggtccgatgggcatgtcacaatcaacctcatcaggcgatttacaaatcactggtgtcctcaatatgaagaccctcagcgatttcaaagataacactaacaagattaccaaaggccgtgctttaaccagtgccgatgttaatactaacaatgttgtgattgaaagtgaacttgctaaacaaaacgatctcagtgttggcgatacaattaagattaaagccacaacgactggtaaaaaagcttataccctcaaagtcgtcggaatctacaaagcgagtcaaagtagcagctcaagtatgggtcctcaacaaagcgatccttctaatacgctttataccgcttatacattggctaaccaaattaaaggccaaaccaataaagtcgacagtgccgtctttactttaagcaatccaactcaaaaaacggccttcttgaaagccgctaagaaaattatcaatactaagaaattcagcctcactgcagacgatagtacttaccaagccttgaaacaatctatgcaaaaaatggaaagtttcgctaataagattgtttggttagttgccatcgccggtaccgtcattttagcactaatcatcatcttgatggtgcgcgaacgccgttatgaaatgggtgttttactctcattaggtgaaaaacggactaagattattgggcaattactcgttgaaatgttcatgttactgattgtcagcttagcactcgcgggtatcggtggccaatttgccggtcaagcgctcagcaagcaagtcatgagttccattacaacaagtaccacaaccgacagtgcaacaactcaacctggcggtaatggtggccctggcggcggtcaagcaccaagtggccaacctggtggcaatcgccccggtggtcaaatgacgcaaggaacgcaaaataaagccaaatcaattaaagctagcgatctgaacctcaaaattaatccgttaaccttacttcaattaggcgcctttggctttacaatcattgcttttgcagtcttactcgcttcagccaatattttaagactcgaaccacgaaaaattctcattggataattaggaggtcacattatgttaacagccaaagatgtcagttattggtacgattcagaagaaaatacactctataaagacgttaatctcaactttgaagccgggcaactctacggcattatcggtagtagtggtgccggtaaaacaaccctcttaacaatgcttgccggtctcgacaaaccacgcaagggtgaaatcctctatgaaggcacttcacttcaaaaaatcggtttgacgcaataccgcaaccgctatgtttcaattgtcttccaagcctacaatttactcccctacatgtcggcactcgataacgtcctaaccgcaatggccattactcattcagaacgcgaaaaccctagtgagtttgcgctagagatgctgactaaggttggtatcaaccctgatatggctcgtaaaaacgttcagaaactatccggtgggcagcaacaacgggtcacaatcgttcgtgcaatgtgttgtgatgcaccagtcgttgttgccgatgaaccaaccgggaatttggacgacactaacacccgggaaataattaaactgttccaagaactcgcccacgaacaacaaaagtgtgttattctcgtgacccatgaaaaagaagtcgccgcgagttgcgacgtacaatatctattgcagcacaaaacttttgaagaagtcacactctagagtagtctaaaataaactgtcgatagtaagcttatcgacagtttattttattgaaaattgttatactgaggctactaaacggaggtgtcttcgatggccacaatctattacgattatttaatgcaggacgatcaaaaaatagtcgttgctgcaaccgatcacggcatctgctttgtcggttcacctaaccaaccacttagcgaactaacaacttttatgcccaatcacgacttattacaagaccccgccaaactggcgccagtgattgaccaaataacggcctatttaacgcacaagagaaccacttgggatttgccactcgacttcttagtgggcacgccttttcaacaacaagtctggacggccctgcagacgatcccctatggtcaaaccgtgacttacaatcaactcgccacacaaatcggtcggccaactgcgattcgagcagtggcctccgctgttgggcgtaatccgctcctcatgattgtcccgtgtcatcgtgtcatccgcaaagatggctcactaggcggttatcgcggtggtttgcctttcaaaaaacagttattagccctcgaacaataaaaaaaggtgtgcccatgggggcacacctttttttattacttttttaacgttcttcgctacctaataaacgacctgtaaaggctgctaggatagcacccacgatcggggctgctaagtaaacccaataatgggctagtgctgaaccgccagcaaaaatagctggtccaaaacttctagcagggttcaatgacccacccgttaagttgagcgcaacgataatcaataaactcaatgtaatcccgattgccaatggtgccatttggctattgccaaaacgatcactggttgtcattaagattaccaagatgaaactgaatgttacgataacttcaactaaaaaagccactcctgcgccaattttagggaagtctgtttgaccaaaaccagtccggcttaaatcaagcgcattgatgagaactgatagtaaacctgaagccacaattgcgcctaagaattgcgctacgatataaaaaacgccatcttttgcttctaagcgtttattaatcatcattgcaattgacacggctgggttaaaatgaccacccgaaacaccaccaaaagcataagccatcacagtgactgttaacccgaatgccaagccaattgttaatgtatcagctttagcaatcacgactgcgccagtgcctaagaacactaacataaaagtaccaataaattctgctgcataacgtcgcataaataattccttctctctaattgttgtgaaccctattaattatacagttaaatagttaaaatgccaacaataatgactcattaattcatatcgttaagcaaataatttgatattatactatgaaaagactatacttattagtaatatagtcgtaaaatataggcttattttacccctttttaaactaagtaaaagagatgatatattacgcaagtaactgatgtctatggtattacgcatgataactgtaaactaatcgaaacagaaaattcatttacgcgcattttcttggcccaaggccctgatggtacacgttatacatgtctcttaccagacgctaaaccaaacccaaaatccaatcaacatttcgtctacggtaaccccgcagatgccccatactaagcactatcaaaaaagggccgccaactaaccgttggcggccctttttatttcccggggaattactcagcaactaaaatatccaagaataattcaccatatttttctaatttattctccccgacacctttaacatctaacatttcagtcagtgaggttggcataatttcacacattgaatacaacgtcttatctgagaagattacaaatggtggtacaccctgttcttcagctaaatcacggcgtaattcgcgtaagcgttcgaataactcattatcttcaggcaatgttttttgaaccttagcagccattttacgcgacactttttcttgacccttaagtactttgacgcccgccaacgtgatctgtaaaacgggatattgaccaccagaagcccgtaaatagcctgatgcgactaaataatcaatcaaaccactgacttctttttgtgaatcgccccgcatcaaaccgtatgttggcaattcatcaaagcggaactgcataatcttctgattcttagagcccgtcaagacttgcgcgaccattactttgccgaaacgttcatccattcgcttgatgcacgataaaaccttttgaacatcaattgtaatgtcttgtgattcgcgtgtatcaagacaattgctacaacggccacatttttcacagtcatcatcaaaataattgacgatatattgttgcaagcactgttgcgtgttggcgtattgtgtcatttcttgtaacttagcgtattcccgttgcttattttcatcgtccatctctgattgatcgatgaaaaaatgttggatttggacatcattgactttaaacagtaagatggcctcacttggtaagccatcacggccagcccgacctgcttcttgataataagcttctaagctgccgggaatttgggcatgcacgacaaatcgcacattactcttatcaatccccatcccaaaagcattcgtggcgaccataatcggtttacgatcgtagagaaaatcctcttggttttgccgacgcaccatttcatttaaaccaccatgatacatcgtgactgccagtttcgctttttcaatcagcttcgtgagccgttcaacttctttacgtgtactagcatagatgatgccggatttttgcttattaacctttaaataatcgattaagtagcgatcactgttttgatttttaaccacttgaaaggccaggttttcccgtgaaaaaccagtcttaacttcatgttgaatccctaagcgcaacataatatcatcagctacttgtgatgtagcagtcgccgttagtgcgacaattgttggttgttgtcgcatgcttttaattgtatccgtcaagcgtagataactaggtcgaaaatcgtgcccccattgcgagatacaatgcgcttcatcgacggcaatcaaatcaatcgttaattcggctaaatccgctaaaaagtaatcagaatccaaccgttctggcgacacataaagcaatttgacttcaccacgtgcggcctgattgaagcgctcctgcacctcaccttgcgtcaaggtactattgataaacgttgccggaatcccattttcgttgagcgcgtcgacttgatctttcatcagcgaaatcaatggtgaaacgactagcgttaaccccggtaacatcagcgctggaatctggtaacataacgacttcccgccaccagtcggcataatcgccaatacattggtccctgctagcaaggattcaatcacatctgcttggccttctctaaaatgatcatagccaaatttttcttttagtactgcttgtgcctgcatgccatttctcccacccgttaaaattcctatctactatcataacaaaaaaacaacaccgttgcggtcaaaataaaaacagtccctaataccaaggactgttctctattattaattacactgtaattctgcctcttaatcccactactgcccaaatcataatatttaatgagagaccgataaacggaaatggtgggtaaaaaaagctgacgatcaacgtgataaagttcaaactaaatgaaacaagttcgccaattaacaacatatgcatattgtgaattgggttcgttttgatgaccaatcgtcttagataagcggtcgtgatattgaatagtaagacattcacgttatataacgttgaggcagctactgaatgaatatccgtccccaaccaagccgttgttgctggcaataatgatgtccagaatagtaataagatattcacccagataatctggccattaatttgcttcacttgcgcaaacaaataatgatgattaacccacattgtcgcaataaaaataaaagtcaatacgtaggcaaaaaatttcatccggacatctaaaatcgccatccatgaatgatcatcctctggaagatgtagttccaatactaaaattgttaaaataatggcaattaccgcatcagtaaatgcttcaaatcgttcctttttcatcaattaatcactccttatttttttattcaagactagtttacggtgttcattagctgacaaccagtcttttttagtgtttaattaaaattaatgactcacgatggaggttttatgatgattaaactgcaagttaacttaaagaacacgcaaactgagattctttttgaccaacaaatgctaaccatctattcggaacaaccggccacattaccaccgtttgacggcctactactgcatacaaaccagcaacaaatcacgcaaattgactatctcgctggggaaatcacgaccattccaaacggaccctttttaacactcactgatgcggactggcccgaaggtctagcctatttaggctgtttgttagccgaacaatcatcagccatcaaaacaaccgatttaccggccaaagtccccagtaattaccgccaaactttacgaccactatttgaaacgttaaacttaattctagaaagatttggtttcaattggcaaccagcggcgaacccaaaagtaaaaccagctgctaaggcccggcaccgttggacaaaagccatcagcgccgtaccatttaacattaaaacgcgacaagcaaccggcactgccatttggcaaaaacgaaacgaaatgtgcctgaaggctggcgcaacattaatgccggaaccgccgctcaacaaggatggctcactcggatttgccgctaaaatgggcacccaattgcgccacgaacacagcaatcaagttcaagataatgtcacaacagaagatattattttcaaaagtgtcaatgaagttggactttttctctactttgggggcaccaatagttggctagaactcattgatcaagatggccgctcaattgatgactggtcaaaaatttaataaggtaggttagcattatgcaattaacaagtacagggattcataatggttattttgatgatatttatggtggctacagtgatgcactaaacgaaattggtatgcccacctattcaattccttttataattgagcaagcacccgcagacactgttacctatgcggcgattttctatgatttagatgcctatgaagtcaccaaagggttcccctggattcattggaccctcgccaatctaaaagcaacaacggtcttggcaaatagtagtcaacaatcccccgcttttgtgcaaggcgtcaatacgtggcacagcccgatgacggataaccaagcagcggaagcctctgcttgctacggtggtatgacaccgcctaatcgcgatcacacctatactttgacagtttttgcactcgattgttcacttgatttagaggacggcttttacctcaatcagttaacaaccgccatgaagggccacatccttgataaagccgttctggaagcaaaataccggcaatttaagcactaagatgacagtcttttcagcatgacctaacacttttgttatccggcgttaaaaacatcgctttttaacgttggtcagtatatgatacctttatcaattaaataatgaggtgttttcattgaaaaagaaaatgattagtctggtcgcaattgttgcgctcatcatcgtcggctttgccggttataactactataaaaatacttaccagggtgacgttggctacgcccaagtgcccgctaaaacgcctaccaagcaagcgacaaaggacgatcaaggtaaggttgtgccaaatgaatacagttaccattaccaactaaatgttgttaaagaagatggtacgcgaacaactgtccctgttgaaatttctagcgaaaaaccaacaccattgacacctaacagctacgtcaaattggaattcaattcaaaacgagttttatccggccctaataatatcgccaaagataaaatcccagctaaagtacaaactgaattagaaaaataactagaaaagaggctcaagcaaaattatttttgcttgagccttttttagtgaatgaattcaatgctattctgaacactggcaaaattagttaacgctgcgataaatgccgtttgaacgtgagacgctgatactgactcaccatttatcgttaatgctttggtagccgttgcatcctgaataagaatcggttgatagccccgttcaaaactcgcacgggtagttgagtcgatacacatctgcgtcatcatgccgcaaatcataagttgatcgattgctaattcttgcagcgcggttgccaatcgtgtttcttgaaaactattcggaaaatgcttttcaattatgatagactcatctgtaacgtacaaatcaggatgcaactgggcccccaccgttcctacttcaaaaaaatcggcatctttttgacatttaatatgttgtatataaataatcggcaaatgtttagcttgaaaatccgcttccaagcgcttcactgcgaccaaagctgcttcgggttgacataaggccattttaccacccgggaaataatcattctgaacatcaattaccaacaatgcttgtttcatctcagtcaccatcctctgttaataggcttattgtaccggtgattaagctactcaaacaagatagccgcctttctaacaaagaaattggcgcccaagtccatctcactgggcaggcagttggtcaacggattaaccatctaatcgaccaacagaccattacccgtttcacgattgaaatcgcgcaacagcaacggcaattcatccgactctttatgaataataatcatttttcagacgtcgaagcagcggcaaatcagtatcctgaagtagactctttttaccaagttagcggtcaagcttgttatgtggtcatcgcacactttgaacaaacgcgcctgacaactttcatcgatcatctttcaaattgggcccgttatagcgttgaagtggttttaaatgataaaaagaaaagctaaatgtttcgtgtgaaacatttagctttttttagagtcgttttaacgcttcgcgctgcgctaatgccgataacgtatgtgtgtcgacaaaatcaatcacccattccggattagtcttagcgtaatcacgcaaggcccacccaatcgctttttggatgaaaaattccggcgttgtttgatcggtttcgatagcggcttgcaaatagtcaatacacgttgcgtccctgaaccctaattgcagaatcaacccgacgcggcgtaaccaaaaattctctttttgagcaaatagttgaccgacccattcaaattcagctggatgacgcttgatgtactcgctaaaaacacgtttccaaggatctacactgtcccaccatgctttttcagttactaattcggcaaactgcaatagatctgaacgttgccatttgcgcatggcccgcgccgcaatatcgattgcgacatattgatattcgcgcgcttcacgtgcataaagcgccttaataatgaccatcagttctgccgctggtaactgtttcacggctggccaaaagtcgcgttcataagcatgtctttcggtcgctttgacaccgttaaaagtgaactgatattgcatatatcgcgccatcgctgcttggttttctggatgaatgggtaactcgaatatcaacatcatttgcctcctctacaccgttttattccaaaggaccttttcatacggttggccttggccttctaagatcgataggcttgcgtttgccaccattttttgatcgcgaatgccactaaacggtacgcctaaaagggtccccattacaaataataaaacaatcccgtgcgccacaattaagacattgccctctggataagtttgttgagcttggtcaataaccgtcatagcccgttttaaaacagcttggtaggattccgcgtgaatctgatcggcatcaaataaatctggatggtggaagtaattatcaaattgcggatgcttttcttgcgccgctaccggctgcgcttcccaatcacctagcgccatttcccgtagttggggggcaatcgctaacgctggttgcacaacgcgcgattgcgccagtaagtgttccgcggtcgtttgggcgcgttggagcggtgacgttaagatggcatcaaaaatttggtcgcctagataatcacccaagcggtctgcggccgctagccccgctggtgtcaacgcagaatcgaccccaccgccattgaaacactgtgctttattaatggtcgtttcgccgtgacgtacaaaataaaaagttgtcatgtttatccccactttcgtttctccattatactataagaaagctgacacccatttcaatagcaaaagaggctacgacaaattttgccgtagcctcttttaatttgaccgccttatttaatattgacgtaagtcaaatcaaacaagtgacttaaatcttgtaattgttctgaatcaacagcaaatgataagactgtatggtgaccaccaccaacagttaaccacccaacggcaccgtcacgtaagccttgttttggtgtccagagttgtttagcaactggcaagtgtggtgtgtcagcttctggtttattaccttgaacatcatatgacatcaatttgaattcgtcgccataatcagccattgtgacatcaaccgcatcaccttgcatcccagtaaagactaagcgtgcaggatcatctttatcgccgatatctaacgggtgcacttcaacgcgtggtttgtctgatgcgattgaaggatccacttcaagcatatgtgagcccaagatagcttcatgcccttgacgtaaatcaagtgtgtaatcttccatgaagatcgtcttttcattgtgggccatgatcttcaacaagcggtctaaagcagctgtcttccagtccccttcgccagcgaagccataaccttcagccatcaataattgggctgctaaaccaggtaattgttccaacccaactaaatcttcgaagttggttgtgaaggctgtgtagccacgatcgtccataaatttcttcaaaccgaagtattcacgaatttggtatttaacattgtgttcaaatttttcaggtgtgttttgaccttcaacaaagtcatattctttttgtaaatcagcatacttagcgtcgatatcagcctctgagacagcattgacttctgcgactaaatcaccgacaccccaataatcaaccgtccaaccaaacttgatttgagcttcgactttatcaccgtctgtgacggccacgttccgcattttatcagcaaatgtcacgactttaatcttaaatgattcgttgtaagccaccgcaacgtccatccatttagccattgctttttgaacgtcttcatcaccccagtaacctgagataatcttgttatttttacgtaaacgcgcattgatgaaggcatattcgcgatcgccatgagctgattggtttaagttcatgtaatcgaaatcgattgtgtcgtatggaatcttgtttaagaattgagttgctaaatgaagtagtggtttttgtaataattttgtcccgcggatccagtttttagcaggtgagaaagtatgcatccaagtaatcacaccagcaacgtgatcgttgtagttagcttctttcatcacttttgtaatgttatcagcagttgttgcgactaatttgaaaacgattgggtaaggtaattggtgactcgcgtttaatttttcaacgatttccttagcgtctttttcaactgagcggagggtttcttcgccgtataatgattgactccctgtgacaaaccaaaattcataattttctgtatttaacatgataaagactccttttttagcgtgctttttgaaactgactcttgcgcttaacgacatttgtcaaatcagcgattccatcgctaatctgtcaaattaagttaatgctcagaatcaactcgtttcaaacgcactcctttttttaatgtatttttcaaactaatcacttttgacgtacttcttttttaacgtgcttttcaaaccatccttctgtggctagctatgtcccgcaaacgatcgactttgtcgctcattcacgggactaggctagtcctcgaaggatacctggtttcaacgcacttcttttttagcatgaccttgtgattgggcgttattttgaccgtagtaggcatttttgccatgcttgcggtaataatgtttgtccaacaagaattgtggcacggcactgttattgcgtgtcaattgaagggcgtgataatccatttcggccaccacttctaagactttagcgttataaacggctttgtctggtgtggcaccccaagtgaaaggtccgtgttggcgcacaagcactgctggaacggcttcaggatcaacgccctgttccttgaaggttttcacgatgaccttgcccgtattttcttcgtaatcattttcgatttcggcttgtgttaaagcttcagaaactgggacatccccgtaaaaagtatccgcgtgtgtcgtgccaagtgcgggcaccggaataccggcttcagcaaatgaaacggcccaaggtgaatgcgtatgcacaatgccgccgatttctggaaattcattgtataaaacggtatgcgttggcgtatcactagaaggattcatattaccttcaacgacttcgccttttaagttcacgacaatcatgtcgcttggttttaagtcttcgtaatcaacaccagaaggtttgatgacaaacaagcctttttcgcggtcaattccggaaacattgccccaagtaaaagtgactaggtctaatttaggtaggcgcatattggcgtcatacacttcttgttttagtttttctaacatgctttaatcctcacttctcatctttaatcgcagcaattgccgcactttcaattggtaaccctgcttggtaggcctcaataaaggtttgataaccagccacacccgcggcttctggactgagcgtcatgctttctggattcgtaaagacgttgtgatccaagaaatcatcgagcgtttgaccattattatcagcggcaaacattgctaagacagccatgccccaaggaccaccctcaccggcattactcataaccgtaatcggtgtgtttaaagcattcgctaagacttgttgtccaacgacgggagttttgaacaatccaccctgggcaatcatgacatccgtcttgatttgttcttccttcaccaagatatccatcccaattttaagcggtgcaaaggctgcatataattgggtttgaataaagttaggtaagttgaagtggctatgcggttgtctgacaaataatgggcgaccagccggcattttagtgacattttcaccggataagtagctgtaattaatcaaaccacctgcgtcttgatcggcatgggttgcttctaagaacaacgtttcgtataaccgatcaggcgctaatgaaactcccagacgtgctgcaaattcattgaataaattagcccaagcattgatatctgacgaacaattatttgtgtggaccatcgcaactggtgagccatcaggggtcatcaccatatcaatatcgcgatgcacttgtttgagcggttggtctaacaccaccattgaaaaggctgacgtcccgactgagatgttcccagtccgtttgcggacgctgttagtgccgaccattccggttccggcatctccttcaggcggtgccatcaaactacccgccatcaaattaccacttggatctaataactgcgccccggctggcgttaattggccagcagcgtgtcccgctggcaagaccgttggtaaaatatcggctaactgccaaggttgttgttgaacgcgtttgatttgatcgaattgtgtgactaaccgcgcatcataacttcccgttttgggatcaattgggaagacaccggatgcatcgccaatcccgaggactttttcacctgataattgccagtgaacataacccgctaaggtagtcatgaaagccacttggctgacgtgtgcttcatcgtttaagatggcttggtataaatgagcgatgctccatcgttgtggaatattgaaattaaattgttcggttaattcatcagccgcttgttcggtaatgttgttacgccatgttctaaaaggcaccaataattgatcgtccttagaaaaggcgagataaccgtgcatcatcgcactgacaccgatacttttaatcgtggtaatcggttcgtgatacttactttggacttccgcagccatttgcatatagctcgcttgaatcccggtccaaaccgcatcaattggatacgtccagacaccatcttctaattggttttcccaaacataactccctgacgcaatggtttgaaaatcttgcgctactaaaacggctttaatccgtgtggagcctaattcgatccctaatgagacctgaccggatttgatggcttgtgctgcttcaattaaattcatcatcatctttcctctctgacacttatgctttatgcgccttgtttgtgccttgcgcttcaatttcttctaatgtgtgacccattgtttcagggacacaagttctaatgaagaggacacccagtaaacaaatgacaccgaaaatggcgaagaccccttcttgtggcatggatgcaatcatcattgggaagagtaacccaactaagaatgagccgatccagttgaatgatgaggctaagccagatgctttaccccgaatagctagtgggaagatttcaccgactaaaacccatgtcagtggtgcccaagtaaaggcgtaaaaggccacatagagacataagaaaacgacaatcatcattgggttaaagttgggaatcagagcattcatgatggctggtaaaataaatgacaagcccatcacggtcccaccaagtgttaacaacgtccgccgtttaaacttatcggcgatgactaagaataaaagtgaacctaaaactaagatgaccccttgaataatcggccacatcagtgctgaactagcggctttgcccgttgccttttccacaatcaatggaatgtagtagaaaatggcattagcgccttgtaattgttgaaatccagcaaccccaatccccgcaatcacgagatatcgatatttaccacttaaaagcgttttcattgaagtgctttgttgcacgttactttccataccggccgtcgtctggatattcgttaattcagtttcgacctcgtcttttgaacggatataaccaaggacttgacgtgcttcatctaatcgattgtgtttcaccaagaaccgtggggattctggtaaacgtaaaaccccgaaatacaaaataatggctggtactgcggcaaggcctaacattaagcgccatgctaactgttcaggcaaaccttttaataaataatccacaatgtaagataacaacatccctgaaacaatcatcgtttgattaatcccagtgagtcggcctcttagtctagctggtgccatttcagacatatatgccggtactaacgcggatgctgccccgactgctaatcctaagaaaacacggacggcgattaagtagacctgtccgtcgtttggcgagaatgctgatagtaatgagccaattgcaaaaatcaaagatgataacaaaatcatcttccgacgaccccatttatctgatagctgcccagctagtgcgccaccgaaaatggcaccaaacattactgccgatgtaatccagccaacaaccccagcattattctctaaatgccagtcgtgttgtagaaagggtaacgcccccgtcattacgccaatatcgtaaccaaacaagatcccaccaaatgagccaaagaagtaaatgaagctacttggaatttttttagcctgcgtcatgcttttttcctccatctttttttaagtctatttaacgtactttttaaatgaccgtttcactttataaaacggtttcaacttgtcgacaaattcagtctataactttcattcgaataaatcaatatgattatttttgattcgaatcaatataagtaagcgtcatcattttaaaccgcatgttattaggcttttgctgttatataatttttttaaattaattgaccaccattttatttattcgaataattatggaaactaaaaaggggctatcgtcagatagccccttttgagatacgtccttatttaacttttccggcagagttccgtttaattaatggtggttggtataggatcgattcaaccggtttatcctgaatcatgtctaagaccatttggcctgcatcctcacccatcttcgtcttattatggttgagtgttgtcagactaggactaatataccgtgacatttgataatcatcaaaaccaacgactgaaatatccgccggtacttttaagccttttgatttcagaaaatcaataacccgaattgcgagttgatcattgtaacaaacaattgccgtcggtacttctgaaccttgtaaataatccgccacacgtttcaatactttctcgaaactgtcgcctgattgatacataattaaattactcttatacgcaattgcaggttgttgttggtaagcttgaataaagccattcatccggtgaacgccttgcagatccccaacttggaaaatacctaaaattgcttcatgaccgagttcaaagaggtaattaaccatctctttttccgcttctaaatcatcatttgtaatgacgggaaaatccaattctgggtaggaagcattgataaagagcgttggaatttgatcgtcttgaatctcgtggtataaatccatattcggatttttaagcgcactttgtgtgggttcaataatcaaaccagcaaccttattatcaagcatattaatcagactcttacgctctttttcatgattattatgcgtattgctaatcagaattgaatagcctttttcagaaagtacccgatcaatacctgagataatacttgggaaaatatagtccgcaatatgcgttgtgatgatcccaatgaccttgctatcagcatcattcgtccattcgcgatgccagtcttggacaaacatccccccgccttgaatccgattgatgaaatgttcttcttctaaatcaccgaccgctcggcgaatggtataccgtgaaacatcgtattgtgccatcaattccgtttcagttggtagtttagcgccaattgaatattgacccgaaataatggcttcttttagcgcttcttttacttttttaaatttattttgcatggctttactccaccaatcaattttaaattgattcgaaattgattgctaattgatgtgatttttaataatttatttgaacacttctagcatagcaaagtttgtcttattttccaatccgtaaacccactttattaaaaaaagacgctgcagacaacattccttttgtctacagcgtcttcttataattatttctttaaattcaatcctgccggttgttggtcggctggtgtgttgtctgccaatacttgatcatgcgcaactgttccggcgtagatgtcgtccgttaagacgttgcgtcggtgtttgataatccggtaaacatgtaacactagtactgccacgttaatcgcaagggccagaccgtcatcaaagcagcgctactatgcgtactttggacagagaattgtgagtccgtcacaaaagcgggataactcatcgtaaacatcatccaaaaagccaatgtttgtgcacgtgcttgtaaccaactgccttttttcacaaagaaagcggctaacgtacatgaaatcaataaagccgcgcctgcgtagaatgaatggtcgccaacacagttataaacgtaggcgaagttccaaacatcataggcgataatccaaggccaaatttgatcaggccagatcatgtctttttgtttgtcgtggctgatgataatcccaaaccaccctgaaatcgtgatgatattaatgatcccagcaaccccgttcatgatgttccaagcgccaccattcatgacaacgccgtccactaaaccgtgtaagccagccacttggaagtcacggataacggcttccataatgttgaaggccaagatagccggtgggaaaatcaatgcccacttattgtgttgcaatttagggctaaaacgcaacgccataaagcctaaacacccggccaacgctgagtaaactttaacccagtggaaccatgtcccagtactactatcaggtccggccgtcgttggccaaacaaaaatcgttaaaataataggtagtccaacaaataataataatgccacccatttgttagcccgtgcggcttcgtttaacagcattaaagctgcaacgaccccaatccaaacgagccaatcaatccccgcaatattttgaaataacatataaacccctcctagaaataatagctgtttctatacttctactgtaatcggttccgttgtttttcgatatggttattccggggtgtttgtccaaatttagcgattattatccagcacttgttgcaaagtcccatttagcatccggtgcatccgctgataaaattcaactttcgattcttgcaggttggtcaccaaccattgaatgatctgcgtcgcgagcgcccaaccataaaagttggccatttcatcgcgcaaagtcggtgggcaatccggttgcaggtcatcaacgacaccggtgaccatgttaaacgcaacgcggtataaaaagcggcccaataaatcgcgattcagggagtgaaatgtatttaaacaaaaatgacgattggtttcaatataacgcaatagcagatccaatcctttggcccaatcctgttctttttggtaggccgccagttgggagacaatctcgcggttataaatccacgcgaccaattcattaatatcggcaaaatggtaataaaaggtgttgcgcgcgacgttcgcctgttgcgtcaactgattgacagtgatgtgatcgaccggcgtcgttgccattagtaatttcagattttgggccaaattttgtttggtatccatctcaaataacctccacttgatagttacctttagcatcccatatcaaccaagcgattgcaatccagattagtggtgaatcagttgcatgaccgaccgagcgattggttggacgataaacgcttcaacgatgaaagctaaggcaaaattacgcggccatttcgcgccaaaatgggtaatcggcgccattgaaatctgaccactgccaatccaagtgccgatcaccgtcagaaaaatggacattaaaaagacgttgcacaacgctgtaattaacatctgtgcttgaaagctatcagtttttgccatgagatgactggccaagtattcggctggcttttgggtcaataccactaatacaacgacggccacccagataaacggaatcactcgtagcgtggcttgccacatttgccacgaaaaaccaatctcaaagccagtgatcaacggagcaattagattgacggataaaattgaaatcaccgcgataaacagcagtgtttccttaaagttttgtggtaatcttttaacaaataacatgaatattctccttaaatgggcataaaaaaaacagcacaaagtagggtattcctactttgtgctgatcaattatacgcacgtttttttgattaagattaattgtagcaaactttcaaaaaccgcgctaatgttatttgcacttttcagacgattgttttatcgtaaagctatcatgatttacgtaaaggagaattgcaaatgacagtcacaaacgatgctgcttttacagcaatgaccaacggcgaatggtacttcgattcagaagcaacggttcaacaacgtaacgaaacacgcttggcgctacaaaagaccggccaaatcttagataacgcgactcggatggccaccatccaaaaattactcggccacactggtagcgactttttcatcgaaaccggttttgaatttagcttcggccaaaatatttcggtcggcgaccatttttatgctaatcgcaacgttttaatctgtgatgaaggccgcgttacaatcggcgatagctgtaaattcggtccgggtgtgtcacttttaaccccttatcacccacttgatccaacagaacgcgccactaaaaaagaaatctctggcgccattacgattggcgaccacgtctggctaggcgctaacgtcactatcttaccaggtgtaagcctcggcaataacgtcgttgtcggcgccggcagtgtcgtgacaaaatcatatccggataacgtgattttggttggcaatcccgcacgcgtcttgcgagaaattcctgctaaataataaaaaaggactgacaaatgtcagtcctttttttaggcttcaattgcatagtattcaataatcgcttttaaggctgctgctgctttcgaattgcccactaatttcgtatagtaagccacaaatcgttcgtccgccacatacatcgccgctaaaccacggtgcatagctaaactatagcgtggtgtcgccgtttgcagccacgtttggtgggctttaaatgccgcttgtgctgcttctgacggtaattgcggttgcgccaagtaagtttgcaaggccgtcgttaagttggcctcagtggcttgcatcgtcgcatactgtgctttggttaaacccgcaaaatgttgatccgcctcttgcttggcttgttcaccataatttgccatcacttcttgcccatagcgttgatcattttcagcgattgcttgttgtttgaactgttcgaatttagtttggtctgtcatttgagaacctccagtttgattttgaagggtggcatctaactgcgccaaagtcgccgtcaacactgcttgttgcttggcaagttcatcccgtttagccgctaagtgtgtcagccgttctgctggcggtaacgccaataactgctgaatctctgccaagctaaactgtaatcgccggtacatcaagattaactgtagccgatccgcatcctgactcgaatagcttcgataaccattactagcaaccgccggcaccaataacccacgctcgtgataataccgcagcgtgcgctcagaaacaccggtcaattcagcgaaagctttaatctgataattcattgccatccctccttcaaaacccactataaggcctgacgtggcgtgagggtcaagcgccgtttatcatttgttgattattttttgctcaaccaagaaatcatgcgccacatcacgcgctttacggtgtttaacttgaacctgatagttcatctgttgcatctgatcttcagtaatcttcccggctagcttattgagcgctttgacgacttctggatgggcctttttgaagctctccttcataatcggtgcgccttgataaggtgggaagaaatgccgatcgtcttttaaaacgactagattgtaacgcgccacttccgcatcggtggtataaccgtcgaccacatcgaccttgccatccacaatcgctttgtagcggatgctaggttccataattttagcgtctaatttcaattgatacgtcttcctcaagccttgatagccatctttttgatgataaaaatccgggtcaaagccggccgtaaacgattggttcaaggccgctaaatccgaaatcgttttgacgttatatttcttggcaaaggccgcactgaccgccaagtcataaccattttgatagcgcattggtggcaagtatgccatcttgaattgttcttggagcgattttttagcaagttggtacgttttagttggattctggttggtcttggctggcgatttcaccagcgtctgtaagaccgtccccgtaaattctggatagatatcaatttgatcggccttcaacgcgttaaataagaaggtcgtgccaccaaaattcggtttaaccgtcacatcatattgcggatgatcggccaaaatcagatcacgatacatattcatcaagatttcgggttcactgcctaacttgccggcaatcgtaattttagttggtgccgcttggaaccgtgtcacaccttctacgagaccaaaaagccccacaaaaatggccaagctagtcgtaatctttttgaacgataatgtccccaaccagcgaatcagcgcgctaaccactaacgccaaaacagccgagagcgttgccccgaccactaacaaagcgttattattcgactgaatcccgaccaggataaaggtccccagaccgcccgcgccaatcagggccgccaaagttgccgtcccaataatcatcaccagcgcaatccgcagacccgaaataatcaacggcatcgccaatggtagctcgatgcgcaacaaacgcttcgcacgtggtaagccaaaagcaatctccgcttcttttaacgccggatcaatcccgctgagtcccgcgtatgtattttgaaaaatcggcatcaatgcgtacaagactaacgtaatcaccgccggcaccgtaccaatccccaccagcggaattaataaccctaagagcgctagcgacggaatcgtctgcagaacacttgtcacttgtaacatcgcttcggcgagtttttggtgcgcggttaaaataatcgcaagcggaatcccaatgaccgccgcaattaagagcgccagtaatgagatttccagatgttggccgagcgcttgcaataattcgcccgattgggtcgttaaaatctgctgaatctgttgaatcatcattaaagcccccgtttcgcaatgagcgtcgttaaatcagtcgtcgtcaattgccgttgtgtttggtcatcaagtgccacgacgaccccttcaggttgtgcgattaaggcttgggccaaggctttgatggacgctgtagtggcaatcatttccggttgcccgctaacaacggtccccaaatcagcggccactaaatcttgcaccgtcaatgtcgttggttggcgttcaatatcgaaaaattcacggacaaagtcgtttttcggttggttaaaaatcgcttcggccgttccaatttgttgaatgctacccgcccgcatcaccgcaatttcatcccctaaacgcagtgcttctttcatatcatgggtcacaaaaacaaccgtattatgcaattgcttttgcaaatccaatacgagatcttgcaattgcgtgcgcgtcacagggtcgagcgcactaaacggttcatccattaaaatcactttcggtttggtcgccagcgcccgaataatcccaattcgctgttgttggcccccagagagttcactaggatagcggttggcgtatttatccggattcagattaaccagcgttaacagctcccgagcgcgcttttggcgaccagctttagaccactccaaaacttcaagttgaatagtaatattttcttcgattgttaaatgcggaaaaagggcgatattttgcaaaacatagccaatgttaagtcggagggtctgcaaatccatttggtcaattggttgaccatcaattttaatcgtcccactagttggttcaatcaaccggttgatcattttgaccgaggtcgttttcccgctaccactagggccgaccaagacaaatagaccattgtctggaatggttaatgttagaccatctaacgcgcggctttgcccgtattgtttggtgacaccttcaaattcaatcatgcgctactccttttgccacttaacgatttgttagttcattgtaccacttagaagaaggccaaccaattgacgtgcttgggcccgtcaatcttatttttttgattcacttttgcactgtgctacgatgaagccaaagcaatcaattgaggagggtttaatatgaaaacacattttgacaccatcgtgatcggtggcggccctggcggcttagcggcggcttatcgtttggtggaacagcagtccgttttagtcgtcgaaaatgatttatggggcggcacctgtcccaatcgcggctgcgaccctaaaaagatgctctactcggctgttgaagccatcgaccaccagcacgccctgcaagctagtggtttagtcggtaccagttacatcaactggccccaactcatggctttcaagcgccaatacaccactcaaattccggacggcactttaaacggtctgcaaagcgctggcattcgaacagtaaccggcaccgctcactttatcgccgaccaccacttgcgcgtcggtgaaacggattatacggccgaccacttcatcatcgcaaccggtcagaccccaacgctccccgcaattgaaggacgcgatcttttacagaccagcaatcaatttttagacctggatcacctccctgctaaaatagccttcatcggtgccggttatatcgccatcgaattagcgaatatcgccgccacagcgggcgctgaagtccacatcattcaacataacaagcggattttacgcgatttcccagaagccatgacaactgaactgattacaagcctccaaaataaaggcgttcagttccattttgaaacaacggtgaccaaagtatatgagacaacaaaaagcctcgtgctcaacaacgcaggcggttttacgctgaccgtggatgctgcttttgccgcacttgggcgccacgccaatatcgacgaactcaacttgccggcagcggacattgccactggccaccacggaattcaagtggacgagcacttagtcagcagtaatccccgcatctacgccattggggatgtcgttgaccggccacaacccaaattgacaccggtcgctggttttgaaggccgctatgtagccgatcaacttctccaaactaattcggatcccattacgtacccactcattccacatacggtttacgctagcccccagatttcacaagtcggtgtctctgttcaaacggcgcaagaaaaccccgaccaatatcgacttaaccaacaaacaaccactaattggtacaccttcaatcgcatcaaggaaccaaacgccatcgtgaccacgatttttgaccgccaaaccaaccaactcgtcggcgcggcagcctacaccacgattgccgaagaattgatcaattatttgacgcccctcattaaaaatcacacgaccgcggctgaactcaccgatacaatctacaactacccaagtcccgccagtgatttgaaatattactactaaaaaagtgttgaagaccgattgggccttcaacacttttttaaataacattttcttttttcgcttttccctgtaaccatagattaaaggccagcacaatcaccaagagcactgtcgcaatcaacataatattgtgtaagccttggtacataatcgcgcgcattgccggtaagaggtgcgctggcaattcgtgcacgcgttggaggttgctcaacttgttcatcatcgccatcgtgattttcccgtgtgatttggcaatcccttgcgttaaagcatggttcaaaatcacgccgtaaatcgacgacatgaacgtttgactcagaatccgtaagagataggcaaaggaggtcgcaatgggcacatcgcgcgtctcagcgtcttcttggacactaatttgcaagacgttaaagctcatcccaagtccgaacccttcaaaagcgcccatcaataataaaaaccaaaatggtgcctgatcgcccatcattaacatcccactaaaggcgattaaaaaagcaaccgtccctaatgttaccacgcggtgtttccctaagcgcggttgaactgccggcccagccagcgaaccaatcaagttggtgaccgcgcctggaatttgcgtcatcccgccgagtaacgcactcaagcctaataacccttgcgcccacattggaatatagatgttaaacgcgataaatgcgccccataaaacgacgaataagataaaatcagtcaccaattgcggatttttaaacaaccggttcggtacgattggatcggccgcgcgatcttccactcggtataagacaactaacaaggccagacctgcgacgattaacccaataatcaaggtcaatgagccggtcccaatcatttgaatcccggtcaataacgtcaccaaactggtaatcataatgccggcgcccaagtaatcgacgctaccacttagatgtgccttaggttgttctttgaagaaataacgtacgcagagaatggataccaatgcgattggcacgttgatgtaaaagacccagtgccaactaaaggtatcaacaatccacccaccaatcaatggcccgacaatcgaagccgcactataactcgcggtcgcgtacccgatagcttgcgcccgcttgcgcaaatcttggtataaatcagcataaatgatgaatggcaaggtgttcatcccaccagcgccaatccccataacggttctagcaatcaggaagaaaccgatgtttccagaaaccgcctgaaaaattgaactgaccgcaaacaataacgttgccaattggtaggcccgtcgattgccgatgtgttcacccaacttactccataaaggtgtggccaccgccatccccaacaagaagaccgccacaatccagcccatatattgaatcccgtgcaaatcactaatgattgctggcaaggccgtattgatgattgtcccatcaagccccgccatcatatttgataataataatgccagtgttactaaaagtgtattcttcttattcactatcaacttactccgtattttctgtttttacttattatagtataagctatctcaattaacgaccttccttcagccgctcaaccacttttattatcatacaccttcaagttgacttgaaggcaaacaaaaaaggccccctttcagagtcctttttcaatcagctacaatgccgtatgggcttcaattatttgccgcacctttttccgttccttttcaaagcgccagtgaccgttcatcccggaatagtgcattaattggctgagaggatagcctgctggtaaattgccttccagagccttataaaccttgctgcctaaagcaattaaggttgccgattgtggaatgccaaggtccttcaagtgatcgagtaaggctgttacattggcttggccaaccttaaccttgctggagtcactttctagtgacccttccaaatccgtgatgaaaccaccccatgcagcagtaccgtaagtaatagctgctagtcgataatcacaacttttgcgatcaccgtggaagttcccgaataattctggtagtgggccagcatcgcccgggttcaatccgataaagacgtattgcaccgcactcaatttttggtctaagactgctttatcaatgtcattcggaaaaccgggttcataattttctttgaataacggtaaaatggcttcttccggcgttgcgtcagtcaggtcgcttggaattgaccagtataaccaactatcaacggctgtatattttgtcatttagcatcacgctcactttctatgataattataaaaaatgattgcgacacaatatgtcacttcgaaccgtttttgagatttcggcttaaagattttcgcgcgccgctatcatctgttcgataaattgcgcaatagtctcaacttcggcttcggagtagttggctaaaaccgcttcatagttttggcgttgccgtcgatgtaattgttggtgaagctcaccgatttcttgcccgcgggccgtaattcttagtacaacggctttttgattctccggcgtgtgaaatttttcaaccaaccgattcttagcgaggcgctgaatatagcgcgataacattccttgcgacaattcagattgcgcctgtagttgcttaaagggaattgcttcgccagcctgtgccagttgcgtcaaaattgccaattccgaatgcgttagtttcttggcttgagccatcatctccggtgttttattggtctgtaaatgctgtaataaccaatcccgctcaggatcttgattattttcagcatgtaatttggcgatcatttcttggagctttgctaatttagacatttttaattacctgtaatatatctgttgactttcattattttaggatctatactgattttacattacaggtaattaaaaaacaagaatctttcatttttacaattaaccgggtcgtttccaccccaatcaattaccggtaattaatcctataaaaagaggtttttaatatgaaagcagcagtcgtaacagattttaaacaagatcctaaatttgataaccaatttccaacaccaattcctaacccagatgaagtcctcattaacgtgattgcctcatccctttccaatcgggcgcgctccggagcagccggcagccactacacttcaacggaccaactaccaatgatccccggagtcgatggcatcggcactttaccaaccggcgaacaagtttatttcgccagcgaaggtacttttgctgaacaagtcgccgtcaaaaaaggccactgggtaacagttcccgatggccttgatgcgattaaattagcgggcatgatgaatcccgcgctttcttcctggatggccctaaactaccgtgccaattttagtgccggtcaaaaagtcatgatcctgggcgctaccggtaacgccggtatgatggccgttcagattgccaaacgcttaggcgcttcagaaattatcgccgtcgcccgcaatacagagcagctcaagacactgaccgacttaggcgctacacaactggtcgatctctctgcagaacccgcacaacgcaatgctcaactcgctaaagctggcagtgacgttgatatcgtccttgattatctttggggcgacgttgcagcaaacgccatgaccgccatcatcccccaccgtcaaaatgccgaacaacttttgcaatgggttgaaatcggctcatctgccggccaaaccgcacctattccaggggctgccttccgcgctgtcgctttgagcttaattggctccggtcagggttcagttgcgcctatcaatatgatgaaatcattgaacggcattttaaccgctgaaaaagaacaaccttttacttttacaactcggacactaccattatcagacgttgaagctggctggcaccttcctggcaatgaacgtctcgttttcactatctaatcggtccctcgcaccacagcatcgcgccgcatacgaattccgtattccgccaagccaatcacaaccgcaatcgtcaacagaatgaggagactcttccaatcttgtttcaagattaataaatctccagcaaaagcgtaaataaaagcaacgatcgtcgaaccggctaaacaagcccagctttgtgctttagccgttaaatgcgtatcaccggcggctagattcacaaaagcagtcgggatcattggtactgcataaccaatcaagacgcccactgccggatgccgcattttaactagcgcacgataaacgcgtgaatccggctttttgtggcggcgatcccgcactctggtcaataactgcacttgcagtaaattcccgagcgttaaaccaatcgcattaacgacaaaaccgccccaatgccccaggcaaaccccgacgagcatcgcaaccgctgaagtcggcgcgccaggaatcactgtcatcacgaccatcactaagccaaacaccaagaacgcatacggtcccagatgacgaatatccaacacatattgccgataatcctgccactgcgctaaaaaagcaatgaccgtcctctgatggcgccaaccaatcaataaaacaatcagcgctagtaagatgatacttaccgccagtatcagccgtttttgttggtgcgccgtcatccgatgacaccttcttttaagtaatgctcaatcgtcgtcaagacaccatcgtgattatgatccgctaacgcaatgttagcggattgtttttttatcgactcataggcattaggcatcgcaaagccccaaggcgtcatcgtcagcatccccaaatcattttcattatccccaaaagtcatcaattcatcatcggtaatttggtaacgcgtctgtaattgacgtagaccgctcactttatccacaccaacattaccaatcaactccgtttgaaatcccgaattctgactcatcaaacctaccggtaaggagccccgtaactgctggaccgcctgtgaataatcaacatccggcccaaacgtgattccgactttggtaatttgatcattaactgagtgccccgtcaactgatcaaaatgatcgaccaacgtcaccgcatgataatactgtttaatgattgctagtgtttcgggtgaagcctgtcgcggcacatacgtttgagccaacccagaaattgttttttgcacaattgtccccgctggaaagcccttcgcaattaacgctaacaacgcttgtaaatcatcatcagccaatgcgtctactcgcagtaaatcatcaccatgatgcacaatcgccccattttgagaaatgaaatctaacgactgacgatacggatcaaattgattttgcagccgttgatattgcgatccactagcgactacaaacttaacttggcgtgcttgtaacgcctgaaaaactcgcgcaaaccgcgcctgattatattgattattctggtccaaaaaagtcccatccatatcaacaacgatcattttaacactcatgatgaaaacctcacttaatatagtcatttgctgcattatcttataggttataataccattgtagaacagaacacccaactcatcggttgtaacaataaaccggccgttacgaaacaaatagcaatgattagccaactattcttccgtccgttaagccatgacatattatttacttcccgttaatagtaatttcagtaactcaacaagtgaaatcagcatcaacccaccagttgcgatactaatgtagaaccacttattgattggtttgcgcataatcttatcattgatattatcagcggctttcttatccactttgatattcttaatgaatttccaagtcattggtaactcgttccagtcattttcacctttgacctgaacttgaaccttatatttacctggtttcaattcatcaaattgccattgaaccggtaatgtcacaattgagtttggtgcgattttactattattaacgctaaaaatccgtttttgtgaaaagacaccttgtttggtgataacggccttcatttgcacattttggagcatcattggttgcgtgttccgaagattaattgacattgccgcatgtttttggaaaagcattggtttaacgctgtcgtacttcaactctggataaaccttgtaatgagcgccacgtaaggcaatccccattgagtaggcgtaattactagaaacgtgagaatctttactcttacttgtcgtttcttcaaggaaatgccagtccccatagactaacccgcggaaaccatcacttggcatcttaatcgttgctgaaactgttcttgtttctaatgggttaagggtgatgacacgatccttcttatcaacatgcccaatacttgttagtggatatttcaagctttcatccaaacccttagctgtagaaacgaagttaacgcccccaccgacttgcgtcatactatttctgagttctgatttaaccttcactttatgatccgtataattcttaaccttcatcataatgacttgtttcttacccggttggatctgcatatcgaagtaattaacgtcattattaacttgcgtttcgaccggaattctttggatttcaaaatcagattgttcatcagtcgccgctgatacagaatgtatttgtaagcctaagccgactaaaccggctaaaaggccaaatgctatgcttttcattttcacagttcaacatcctcttctttataaaatgtgctttatggggcaaccgttagattccataataaggttgtcgaataagtcgtgttatatcgcttcgttgctcctggtacaaacaatccaatactgtaatccgctgttttttcatcaccaaattgatacttataaactgcatatccagggcgatcatacgttactctattatcagtaccgtcatctttaacagagccattagtgttatccttgtgcaagaattggccctcttttttatgtgttaccaggcgtcttggtgtgccattaggaactagattgaaatgatctagggattcagtcttatcacctttacctgaaccttccgtcgatttcccttcagaatgcgtcatcaaaaatttcgcattactaaattgaagtcgagcaccttctaattcaacgtgtttacttggtgtattagaatcacccttgtaatcgctttggaactgaccaacctgtttaacatctagcgcccaactatcaattccccaataatcagagatttcaacactatatggtgttttctgatatttcattgattttggtgcgggatctttaggcgctggcatatagaaagtacggtcaatcttagtatcgtagaacttaccaaaatacattttcttaggtaacgctgtgaatcctaaacgcgccttttcatagtaaattttgtaggttacctcatccatcgcaatcgcggggtcaatatcctgaagtaatttttcaggcgctgtattggcatcaattgtatattcgacaggtgtataaccttctatataagctggtcgaatcttatttacatccttacttccattaagatcaccttcaataattgttccggttgaaacgtgttcaccaattttaccctgaacagtgattggatcattaatagcttttccagttgcacggtcatatattcgaagtgcactttactgtcttttggcttcaccgtttccatgctaacttcagattcacttgctgtagtacttgtatcaggcaattcactaagcgttgttaccttattgcttaaaatatcaccttcaatagcggtatccataaccttcgctttgtaagtaatcgtcgcggaatctcctggctccatttgtttcaacgtcatgctccctaaactatcaaactcctctgtcgtcccatcagaataatcaactttaatcggcttcttaccagtttctttaaccaattccaatttcttatccatttcatcgagtagagcggttgttttcatagtgctactcttctcatcaaccgtgaacttaagcttaaatcctagaacatcgcgtgcatgaacttgcgttgtatcctgatattcagtttctttttcactttcgttacgaaccgttttatcaataacagttggtgccaattctactggaatatctgtctgcgctgacgccttgttataaagtactttaccgccttgagataccatgcttggctgtaaggtcttattagaggccttactattaattttcgtgtcaaccgatactgtggtccattcgttatccgctaaatctttaggtaacttataagttattttatgagtagaggcgttataactcttaacatcaacattaacttccgaaccatcattcaatttagctttcatagttttaggatctactgttaatcctgctggaatcgttgcggtcattgtgatgttatcccacacactcttgaatccaatattatgagttgcaaaatttaacgttaactcatccaagacatgattctttttatcagtagtcgtattatttgtgtatgacactacggcttctggcacaaccacaccctcattaaagaacccagcatcattacgataatgatagaccttagtagcatctaaagtttgtggttcccacatcgcgccaagcgcagaatcaccagcaccagcaataagacttccttcatcaaccgtaaacggactcaaatccgctccacccagtgacgatccataataggtataatctgccatcccatattttgattgcgtatccatctgtgcacccgcggtttggtaacggataccttgataatgatccggtccatcggctattttatcttgcataatgaattgtcatgtacatcccatttcggtttccttgtgcatagatatcaggtccttgattatcatcaagttccgtatcttctgcgtagaaaattctgacggtttcattacctgtaccaacgtcttgaagatacatttcttgtttaatgacgggctgttcctctgatgggcgtaagacgaattccacttttagtttgacaccttttacagttgcgattccgacagctttcaaggctggcttattataactcgtggttccgtcataaattttaaaacctttatccattaaataaggaatagatgtctcagctaaaatttgtttttgattacttgtttccgttgttaaagcgtaaccatacgaggtagtcagtccttgatttcctttatggaacccattaataatttttccatttgctaatatgaacacgtttgtcttaggatccacataatcacgtgtcgtaggcgctggatcattagaattatattcactcttaagtgacccatcagaattcccaaaggtatatcccaacttaacgcctggatcatctaatggtaaatattcaatggtattttgtggcacttccttccaatccgtaataccatcattgaacccatctggtgaaacccctacacttttacttgtgcttttaccgttaactaattgttcactagcttccttaacactctcgatactaggtaactttcctgatgaactcgattgaacaagaaccgattcggttgacttactgctggatttcgaacttgtactcgactccgcctcatcactcgaactcgaagttgaattcgatactgatttagagctaacaatttcactagtgtcttttgttgaacttgagttagattttaattttgattctgactttagacttgtacttgccttagaaacatcttgttgcgctgcgattacattactgctctgaataataaacaagcacactaacataacgcctaacattatacacgtcgttaacttcttcataaaaaaatctcctctcgttcattgactatcgagaatatttaaaattttctatccctatagcactcatattcatcagatatcatccaattaagaattatgtataaataaaaccactatatgactatcattaagactatcattaagattgtcattaacgctattcatggtttctaacataaaatataaactatgtaaccacaaatgaattctataatatattttaattgattgcaagtgggttttatgcaagttattacccaccaataagtatttatgcagtttaccacctctgaaatgacttattaaatcagcaatgaatacggttaattaaaaaaacgatatactatcccaatacagttaacacagataaacagtaactatatatacaatgttaagcgaaccaatttttagttcatgcactttatatttgttgttgataaactcttttgtgaattatattcattccgtcttaaagttcatttttttttaaaataattgtctttaattgaatttcttattcaaaattcccctttttattatctaattctaatctacagtcggtttctagttctgatttttgtcttaatatacatttttaagccttttttttcataaatattctttttgagtaaaaaatacatttttagcaaacataatcattaacgaattaaatgatttcatctgtttcccaaaaatgttaatcgctacaaatcccgctctcataatattgtctagtcattaaaataattcatcaatactattcaaccgcattaacttatgtcactaaataagtcgtcattaatttcatcatcattttctaactatcatttattatctttcagatcatttttggtcaaataattgcatattattggttactctacatgtatttatgcactgattacccacaaccgcctcttagtcggaggataacttgttcatgactttttctcatcaaaaaagccgcgttaacaaggcatacttgtctacacgactacttttcttcctatataaataccgacgttaggtttcctgttgttgatttgcctgccaattagcctgattaggctgcttcaaccgaacttgtcgtttatgcatccactcgcttggtgcttgctcgtaggtttcaaaatcgagcgtttgtatcaaccactgcttttcatccgtactatattgcatcgtgaccgttgcattttgtcgatcatcattggttaattcaaaagtcgctttatctgtttttgctatcacttgaacggcttgttttaaatcaatatataaatcaaaggtaacttgaggttcttgtccaccatctatctttaacgaatccacgttcatcgctagttcttgaaattgttgctgataggcctttagatttggttttaacatagcaaatacccgtgcaacctccgcacgatccttggcggttaccccctccaagtgactgaaatctaattgctgattgatgctttgatttaacgattggtaataggtcaatacgtcagctaatcggtgattttgaaaatcaggttggtttataaaataatcgggcgttaatttcagttgatagttgtgctgattcaggttaacttggcggtgttgcgtgactttcccataacattgattattgattgtcaaatccaattgatattgtcctgggagataagcctgctgcgtctgatggctttggttagataattaccacaactgattttgcccactaatatagatggtcgttttactgggcacatcgcttgccgaccaacttagatagcgcgcttgtggtaaaaagcgttttgctttgaaccaactgtccttattttctatcttataagctgtcgtctgcgttaattgttgcataaaattcttttttgcttttttggtcgctagttgtgcttcgaataattggtaacttcctttagaaattttacgaccatttgcaaaccgcggtaccattttttcaacaaccgtccattggtgcttattgaccgccgtttctaaacgtgccatctgcgccggtagtgattgataacgccaatagcaacctgccgctaaaacaatcgttagcaaaaagccgcccagaaaaagaatctttttccagccggctttcattttagtcatctaatccacccataaaggctgtttgcaattcaccaaaatcatagttgtctgagctgtcttcgctatcaacagtccattttcctttttctttgactaacttaactttatacccctcaccatccatatattctggtgtgctgactttggcactttcgaatttggttggtaattgttgcaagagatatttttcagcatcttgtgtcgctttttcataatcatcatacttatcttcatttttatccgtaaaatcatcaatgattgcttcgaaatcaacatcatcgaagttaatcacttccggtttaacgtaaatgattgctgccttaggaagcatctcagcgaccgaatattcaacagttgcttttttggcattgatttggttgaaactggtgaccactttttgtaattctgcagttgatggtttgtaattatcaaactgtttacctagtctttctgcaaaagccgttttaaaatcgtcatgttctttttgtaaatcattcgttaaggccgctttatcgtcagccttagcgcctaagaaaacttggtcgacatattccttagcgagtttcgtcatttgtttggtatggtctggatacttgtcggcatcaatcttgaccttcacatctttttgcttttcttcgccatcgttacccttataatgcaattcatattcttggcctttttgaacgttaaaatcaacatagccggttgtactcttaccaccagaaatattaccgctttctaattcttggaacccattatcatcatcgtagacattggtatcggccattttattaccgtctttatcatataagctcatgtcatatgatgatactgatagggccttttttgttttattatcaattttgatgtttaaagccaaatatttcttactgtcactcgcctttttaccgtcgggcaccacatagactccactcttcacggaaagaccaactgcccctgtgctcgccgttgcttgaccttccttgtttgatttcgatgaacagcccgctaacaacatcatgctagctaagcccatcgccccaaattgccatacacgtttcattttcaccattactgcctcctatatctgtcttagcttcgattctatcaaacctaaattacagctatataccaaaggtgtatattttatgtatatcttgaatagcataattaacgattacgcttgaataatagcgcggttggcaacaatgattatcacattagttaatcatttcgaactataccgataaaaaaagaaccgtgtcttaatccgacaggttcctttgatattatccgttttgttgtaagtaggttttaaccaactggtaattcttatgaccgccactcagattataaacggtctcaaagcccatatttaatagtaagttttgcgcagcattccccgtaacacccttgttgcaataaacaactgtcggcatcgtaggatctaattcatcaagtcgttttctgatttcacctaagggcatactgattgccgtttcaatatgctgttgttcatattgtttttgtgaacggacatcaatcacttgcagactatcccctgcggttagttgttgatagagttcggttggtgataataatggtctaccattgcgcgcattttccaacgccatccccgtatacaacaccggatccttagtcgttgcgtagagcggttgataggctaagtcgaggtggaacaaatcagccactttggcaccaaacgaaatgaccgtcacaaagacatcgattcgcttatcgacaccatcttgcccgataatttgtgcgccaagtaaacgtcccgtttcatgatcggcgattgctttgataacattttccgtgccgtttagataatcagcatgtcccggtttgatattgtataacacatcgatttcataaccttttgcccgtgcgaccttttccgtaaaaccagtctgggcaactgtcgtatcaaataaccggacaataccagtgcctaaaatgccgcgatgtgctaatgcaccaccagtcattgcatcccctgcaatccgccccatcttattggcagttgagcccattggtcggtaaagtggtgacccgtcaattaaggaaaagctttcggcaacgtcccccaccgcatagatgtttgggaccgaggttaacattctatcggtcacttgtaatgcgccagaggttcccttggcaattcccatatgatcgactaattgcgtttgcgggataacccccgttgccaatagtactaaatcaactggtaattgggtgccatcactcaacttcacggcggtaattcgttgttcttcaactttcagtgactcagtcgtcacgcctttaatgacattcacgccattttcaagaattacttgttcggcgcgatacgcgatttcgccatcataattggtcatgatttgccgactgcgttgcacaagggtcactgataacccccgtcgatggaattgttccgccatttcaagaccaacataccccgttccaaaaataagcacattggaaacagatttcgttttgagatagtcatcaattgcacgggtatcgttcatatgatgcagtgtaaaaacattgtcataaccttgatcaaatggtgcgatcacgcgtggtgctgcaccggttgctaaaaccagcttgtcatagtgatcttcaacaatttcattagtcggtaaatgcttgaccagtagcgtttggtggacctcatcaattgaaacgacttctgtggccgttataatatcaacgttaaaacgggttttaaaccaagatgcgtcccgcggaattaagtcatcgagcgcttcaacttcacccccgagataaaatggcatgccacaaactgaatacgagatatcggttcctttttcgtagaccacaatttcgtgatcctcattgttccgccgggccttagcagcaacactcgtccctgctgctactgaaccaattacgacgattctcatcacagtcacctactttcgcttattaacctcaatataacaaaaaataaccgattataaaagcggcacgccacctagcaaaaaagggtgacaacaaaatcacttttgttgtcacccttttgattaattctaatttagccaactagaaagaaacgtttaaaagtcgcagtttctgtggcctgttgttgttggtaccaacttgctaattctgcagataattggtcgtagagtacttttccttgttctgtcattgagatactaactactcgctgatctaatcgtgtcccacgagtctttttaatcaaacctttatcctttaacgtattgagctttcgagtcacaataggacccgatgtattaaacttaaccgccaattcgctaggtgattgcgtcccatattgcacaagttgttctaaaaataagaactgttcaaacgtcatacagcgcgtccgacacaaactatttaattgcttcgaaataacactcgtttcaaaataccattggcttaatgctaatacctgttgctttttatttttcaatttaactttcctctattctctttctaaaaatctatgtatcgacactgcataaaatgcaatgtctaatcacattatggcgcaaccgttaaatgccattttagggttgtttgataatgcgtttgataccgtttggttgtttgtgggacgtggagaccgatgctataatcggccgtttggggatcgccaaagcggtactgataaatcgaataacctggtaaatcataggttagatttcctttattatcagtttgttgatgccgatactgcccacttttgtggtaggtcactagcgttttgggcttatcacctgggatcaaactaaacgctgcgatactttcaatctgatcgttattttgctgactattattgccatcagtttgaacgagcttgaaattagcattattaaattgaagctgcgcattgtctagttgaacatcccgcgtcttttgatattggtctgtatattggccggtaaattgcgttgtctgagagacacctaattgccagtcgttaataccccaataatcggaaacttcaaccccatacggcaccttcttatcaccttcacgttgtcctggtagataatacgtccgttccgcttgcgtatcagaagtggggttaaagttcatgtcagccggtaccgtcatcgctaggcgagaacgttcataacggaacgtataatcttgcggcgtggcggtaattagcggatcaacatccttaatccggtagaacttagccgtgctcaaatccgcttggtccgtatagtcgactgggacatagcttggaatatttgctggtcgaatttggttaggatcttgatgcccactgacatcagcgagtgccgcttcagaaactggcttaccaattaatcctttgaccgtcaccgctttagcgccaatcggactacctgttgcccaatcaatataatggaaagtaatttgccccttagccggtttagctgatttaacggtcgcatcagttgcgcctcttaaaaccgttgtactatcagcaattgccgttttggaagtgactgtattttttaaatcgatatctggtatctgatcatgggcgactttcacctgatattcaatatcagcatgctgtcccgcagttaacgcatggagtttaacagcctttaagtcactcgccttttcactcgttccgtcactgtatttaatcaaaatagaatcagggaccagcgttaaacctttatgtaacgtatcttgcaactcagttgtcgttattttgtcagtcatcttatcatctgctgaaaaacggatgcgataatctaccgtgtcatctggatgaaccgtcgttgttgtttgatagtctttttcacccatcgtttcattgcggacttgcttgtctaatgccacttgctttttatgaatcaaaatcttggtggcgtcctcagccccagcaatctgatcggtgccaccttcagcatgcattgtattggttaaaacccaaccttcacccggtttattgactgtcgcatcaaacaaaacagtttcccaatcattatcagctaatgaatcaggtaatttaacagtcaatatgtgatcttggctattataagcacttgctggcattttgacgatttccccattagcacgcttaacccgaatgctatctggattgacatccagcgcagttggtactttatcagtaaccgttacattctcccaatgactatcaaagccagtattatgggccgctaaactaaacgtcaatcgatcaccaacctggttgtaattctcactattcatattattaacgtatgtttttttagcacttggcacaactgtccccttacttgtcatcccaatatcggtttgataatgatgaacttcgccaggcttaaagttaatccacccccacttggcactataagttgaatccggaccattataggcaacggtcccttcagcaagattatccacctcaagccccacaccactaaaagtagctggtcgataatgccgataagcatagtttgaagaatcgtatgccaatccacttctagaaaaatcggttgccatataatgaagtggcccatctgccgtattcatattcatgaagagtttatacccatcgtttgcaatagataatcccgcattatctgcctgggcgtaaactggggcgccatcgttaccatttaaagcagtatcttttgcaaaaaagatgcctgcctctcttggtaaaagataactatcattggcaatatacaactcctgttgaatgactggctttttcagcgatggtcgtaggactaattcaacttgataggtatctatcagataccgcacttgccattcagccttcaatactgcttgtccttttgaatccgttccacgatataccttaaacgaattaaaatgtctactaatcgacgtatcaccaatcgattgaccggtttgatccttttccttggttaatgcataatcatacgaactggttaagccgcgagccggaaaataagagaacggtattttacggccattatccactaaaaagatattcatcttaggcggcatccccttagtcaaggttgaactccccgcacttttttgttcctctagcgtgccatcatcattgccaaacgtatagttcagcgtctgtttatcacctgctggaatcgattcaattgttgcttgcgaaacctcttgccaattatgaataccgtcatcaatcgcgattgttctcaatggttgaattggttccaacggttgtttcttttggatcacgctctccttttttgaagaccgttgactagccgactgcttattcgaagacatttgcgtctcacttttttgaatgtctttggcggcttgactcatattcacctgaaaataaacaaaaccgattaatgtcatacatccgactatcaacgccattaagtttttacgcaaacttcattcctcctccaaaatatatcatcagttttaattaatttcgttagtgtgcatttaaattgacaactgttaatacgaacaaagtttataataatatatcgtgtaacgcaagctgaaaaagttatgaaaacattattatatcaaggtttttatgtggttatttgacacgctacttgtccagggtaactagttagtttttagtctcacaaaccgttttaaatccataccgatttggcctgttatgattaatttttttacctattagcgttactaacagctatccaaaataaagattacataatggatgtttgttaaatacgcgtaatttgtgacaaaaacaccttacataaaatatgcataaatatttaaaaaatcttttttaaatttattaaggtcattgattatcatacggattaaaaccgcttaacttgacatcaaaaaaagctagaccgatatggactagctttttcttaacacgattattcacttaatggtcgttttaataatgtccgtgatgggacacgcccaccaaaaattaacgtcccggaaatgttccgataaagttgccctaaataataattctcaacgtcaactggtggaaaatagactggcagatgcttcaattgctgtctcgttggcgcataatcgaccggtgtattcaaaagcgagtagtgctgatcctttttgggcttttttcgataaaagcccacactcacactatccttatcaccatctgagccttgactatctgcagcaacttcaaccatcatcccggcattaggactggcttgtgtatcaacctgattaaaaaaagcgactgctgaaaaaaccattggggtcacccacaataatgagtttaatcgcatcgtttagcctccttaatccgtgccactaaattaccgaatacttcccaatcaattgcatttggcggactattccaaataatgtagtcggattggacatgtcgactcaaaacatccgataaataaatatccgtttcttctgaatattgattattaatctgaatattattaaatggcaatgcccgtaaattagattcaatgaaccgattatacgacattcctagtgaaaagttaacggttaccgtaatacttgggacaagtgctttaaaatccaaattgttcaacgcaatcatgacaagctccatgataaaggtcttatggtttttcactttcttcaataactgttcttcttccaacgtatcaataaaccttagacacccttgatacaactcgtaatagttttcttcaaagacgctcaagttagtactgaaaaaaccatctaagacgatattatcatcgtagtaataacgttgacaaagtttccataattttccaagaattggactatctgttagatttaattgcaccggttcttgatgttttctaaacgatgactgcaaaatcgccaagacccgctttttaaaatcagctggcaataaatcaacattttgatgaggtgctttttcccagcccaaaatatttaatagctgacataaataggcaatctcgtccgacttaattggcaacatgcctttaggccattgtgcttgtacttgttctatttgcgactgatattcgccaatttttgcttgccatgctggttcaacattaaattcaaacccttgctgtatgcgtgtactagcaatcaaacaataaaaggttaaaaagacccgcttagcatccgtcatagtcgcaataataccttgttttccaataagctcaaccagataatctgcacgttgaattttaacctgttcaaacggtaattcataatctttaaacgcatggtaataaagttgcgttaagactaaccgtaatcggaattcatcatgcgcatttttagtatcgaaccctttaatttggtattccttcaagaaggtccgaacagatttacgaaccttataagctttcgtcaaactaatgtaggcttcatccgaaaactcttcaattgttgcccccgggtgtttgagcatgaaatcaatcagactaaaactcagcgagcgtcgacaataaacccacagcaagcggttgattgaatctaagccgttttttcgatagtggtattcaccattttctttttcaatataaaaatactgatccaaatctaatttttctaaatcttgaattaaatctcccattaaacgattaaccttaaaataagttaaatcaaacttatcttcgatcattttaaccgaaacagcattcgtcggtgaagattcgatataagcaaataaaagaaggctctggtaatcttctgcttccaataagtattccattaacgcgttcgctccactctattgattgctgtctcgtttactggctgctaattcactttctaataacttgattcgacgttgtttccgccaataaatcacaatgattaagattaataacaatacaatgccgataatgattagacttagacctaaccatgaatcgtcttctttaatcaccgctttttggttatagtgccgtgcttgttttttagtaatcgtaaagtctttggtaaattgccagtgttgttgtttagacgttactacgacctgtgccgtataccgacctggtttaaaggccgtttcaccaatcctaaccggcaactcgtaaactgaattaggtgccatctgaccgtcagctgttttttgtgtataaactgctttggcttgcccttgctttttaattgtgaccttcgttgtcaccttatttaaaaaggcggcagtttggttattcaatgggatactgatgacgttgcgattattaatttggcgcgtcgttatcttacccagactcattttattttttgttaattcttgttgcccatgtaagaccattgcgattgtataggcgtattgattcttaacacccatactactatcagtttttactttgtcatcggtcacctttttaacaaaattcaacccacccacgagttcaccatcaaacgccgctttgggcatcttaatttgataagtcacgggtttcacttcgcccggctgtaattgtattttattttgatcagtagtgactactttttcaatattagcaggtagtccccaacttttattttgtttaaaagccttatattcaacaaccccattggtattcgtagttgctttggccactgaggtttcaacagtgatgggtgtttgactcgtactcttaacattcaccgtcaccgttgtggcttggtttggcgctagctttaagtcaaaataagtcactttttgatttaactgttgtttagaggcgaccggaatcacttcaaacccagcgttattagcggcgtcggctactttaacattaacgaacacgctcatgaataaaacgagtccccagatcattaaacgatatttgcgtttcatattctaatccccttgtcttttttccagtaagcagaaatagatgagactaaattagcctcatctatcttgattattttaatatggcaccttagttgttggctggggcatctgctaaattccaagttaacattgttgtgtaatccttagccactttaactgtcttaccaggaacgtctaatgtcactgagcccgtattcatgtcagcaatggcagtcccattaccttcacctgctgcagcacccattattttgtgagctgtattatcagttgttaataccaagctttgatcgacagttgctgtggctgttgaagcagtatctaatgttggtgttttgattgttatttgcgcacctgttaattcagtgttatcactcgttttaaattgcgcattttgggcaactgtcaatgtccagccagctgctgtccctcgaatatcttgaacggttgctttagcatcattgatattcgtataagtcttatcatccgctgaaatgggatttgacccaaaatcgatatttaaagcatccgtattggtcattgttaaaccaccagtatctggtgctttgaaaccaaccttaccagtcgtatcgtgactatcagtatcggccgcatgtacttggcccattgaaatacttaacatcccgctcaataataaagtactcatcataaatttcttcattttaaaaattcccccgtctttgtttgaataatcctaaactgccaatcagtaaaacaatgcccacaatcgtgcttaacccgactgagcttgtcccggtttgtggcaatctagcttgctgttttgtttcggtttgtattggcgcttgtttgtgtggttgacctgtttcgtaaaagccaactcgtgcaacactcttagtcgctgtttgtgcattagcacttgtgtgagttgggtttacaacgattaggccgcttccgatgatcaacattagcaccacaaattttgatttgttttttaaccagcgcaactgctaatcacccccactctttttacatctcaacttttgactatcgcaatcattaaccttaatgacactatagcataagcgcttttcttaattttttttctaatttaaatcagcatttgaatttccgaaaattattcgttagcaacaccatcttccaacgtccattcgacttgagccgcgtattgatcgattaaagcaccgccgactggcacgactaattgcggccctaattgattctgccattgcccagaaatatcaaccggatcatgactcgtcgttgtagtcgtcgcaataatcgttgattgcgccgtaatcatcgttggtaattggtcggcacgttggtaagttaagtcgccttctagcggtgctttttgcgtatcacctgtaaaaggttgtacgagtgctgctttcaaagtccacttcgatcctagcgcgcgttcgtcctggatgcttaatgcttgattaactgttggttgataactttcagtcgtacttgccaaagcatgttggccaaagtccatctcactaggcactgatttaaaatagactcggttataatacggattgtaattcagtaacaccgtcacgttctgatcgacagccacatcatcatcaaatactaagccatcgctcggatatggattatcggcaacggtatagcccttatccgctaaggctgctaaagtagcgtcggttcgataatcactgatttggccactgacgccggttaattgatcggcttgaatgacggcctgattatcgcttcgttgataagtaaccgtggctttttgcgcttgtcctgtgtaagtgaccgtcgccgtaatatcggctgagtcttgagtaatattttcaaccgccggaacagttaattgatcagcggtataacctttaatcaccggactcgtctgttttgcaaacgtcgttgtcccttctgttgagacccacttcgtaaagccaatcgattggttggtgacttgatcaatctggtcatgtcttgtaaaggttattttatcgaccacatccggtgctgcttgcttattagattgatagcgataatgaatcgttcgtttgacttgcttgctttcatccggtgccgctttaatcgcatgttttaagtgcactgtaaagggctaatcttggtcgctaaaaagcagtgttgcgccattggtttcatcactcactaattgataaccctgtttttcatacgctgctaatttcgtttgtgtattgtattttgaattttcatcaacaacacccgacatcgtatcggtcgctaattgcttccctgttgtgtcgtcgacataggtcacgtcaattttttgtttattttggataaagcgatacaaaatatcatcaactttacctgcttctttgggataacttaaagtgagcgcaccagtatctggatcagcgcctttgggtagattcgacttatctaacgtataccccggaattgttaaatcttgcgttgtgatttgtaatttatctgtatcaggccaaccataatgagtttcaatcggtttgatgtatttaccattttgatcagcataatgcaccttgattgtggtttgtccatctgttgaagcactgggtggtgatgatggttggttaatcgtttctgtattattaagtgtatctttgtacgttgcttggaccgtattttcgatacttggatcattaaaactaatattcattgtgaaataagttgaagtcgctaaggccgaataattgttattcgatagccggttgagcgcgtaatctaatccctcttgggtcccatcccaagaattattcataacccctttggtaatcgtatcgaccggtaactcataaggccgtgtcaaattgccatagttcaagtaaagggtcatactgccatccgaattatgcaaaacaccataggtttgcggcgatgttttagcgataatctcatcgtcagtcgcatcggcggcgacactgccgctgttaattaatcggcacagctgcgggggctttaatgaagagcatcggcccagttgtccccgctttggcagccatatgttgcccatccggcattaacgctggcatgtaagtttttaaatcaaagctaactttattaatattttgtgctgactctttatcaatgcgataaattcggacataattagccgttggcacgcccttaaggttaggcgtgccatctaaggctgactggaagtaggtttggtcttttgtataaccacttaaggttaatgttccttttttgtcagaaccaactgccgcattagtcacttgaaaaccattaaaatgcgtggccggaatgaccgtcactgatgatttcgtcccattaatcgtactgccggcataagccgccgtgtaatcaggcgttgtttcattcgttaaagttgccaccccacccgaactcttaggcaagtcactcgacgcatcgaccgctttatcgggaacatattcactgcccagtaccaacgacttaccgtcatattggcctaattccctgagtgagacgctggccatcgtaaccggtccctgaccacttaattttccagtatatctaagcacactgaaactgatggtatcaccaggttgtagcacattattaggtaataccgagaatttaattactttaggataataggttcctgtatagccctgagagatatcgtcttctgactgactataaatatcccaggtgacagtcgttttaacgcccccttgatcaatcaaatcttggattttataggtcgttgctgcgcgcgctaccttttgtgtcactggtgtttgtgtcttagccaatgatggcataactttaactggattggtcgactcgccttttgtttcaggcgcaatcttaggcgtttccgaagcgagcgtttcgctcgatgattgactggatgtgctctccgaatcactacttaactgactggtgagtgtcgcatcactgctagcttcagtcgcataactatgcgtcacatcttgtcctaagccgaatccaacgacatataaggctagtccaaacagtaacacttttctaaaccctttttcccgattcaattcagttcccccttccccactatgtcgttaatatctcacagtaataacttacgtaggtaaattattgttttcaaaaacatttacatagtcgattaattatttttttagtatttgatttgaaatgacgatgaattgtgccattaacgcatcgcttcgcgtactatatggcaacaaaatcgcatcatattcatcattcagagtagcgacgattgccttgccctctgccgtgacctacaaactcgttatacgttgatcttcatcttttaggttatataattttttaatcttgccattccgaaacagaaccgttagcttacgagacatcgcgggccgtgaaatggcaaaggcctttgctaacaatgatggttcattacaatcattttcaacaatttgtttcaaaattaagtattggctaaagctcacaccatgccgtttcgcaattgtatccaagccattttctaaccttgttaataattggtaaccttctaaatattgatttttttcactcttaatcatcgtgctcatctctcttcatatgctttaccttcaaaatccgatacccgccaataacgcccattaagaccatcacaaaaccacccaataataggagattgcgatacttcaaatattgatcgttattttggttgatgtagcgggcctggcccttactaattgcgacattcttatgaataatctgttgctgatgcgccgttttaattgttagcgtcatccgataaacacccgctactaaccgcttgccacctagtgggacatcttcatagaagcgagaattcggggcaattttacgatttgatttctgatcctgataacgaatcaatgaccactgttggttttgtaaatcaactttaacggtcgccgacttcagataagctggattgggattagcaatcgcaacactaatcgacgcacgcttttgtttcacaaagcgggtcttgatttcagtcgaacgtagcggttgccggtctttaaccgttaattgtcgtccatttaagattaaggcaatcgcataaacgtaatgattttcaacagcattgtgttttgccaactgattcgtgcttaaattaatcgccgtcgctttttgtcctttaaaactcttggtaggagcttgaatcgtaacctttaatcgttttgtttcgtttggttgtaattttgttgctcgtggtactttaactaattgactccccggctgttttaataactgccgatcaatcggattggcccccagataatcaaccgtcgcattatcgttagttgttgcatctttgacgcgaccataaatcgtcaacggttgggcggttgggttaaagacttttaaaaatacggtgcgttgttgcccctgctttaatttcaaattaaaataccctaactgcttaccacccagattatccttcggtaattcaggtcttaacatgaacgtcgccttgggctcagcaggaatagctaacccctcactcttagcgaagactggattactcgtttgaacggttaataaatccactaagatcaagcaaaaccacaacatattcaaacgtttaaacataccagccttcctttctaatcacttatgtataaaaccaagtgccctcccaagatagcgcttggtttcatgatgttttagttgatatgtcagcttagattgttgtgtttaatgtccatgttaaaccagcgtgatattcaccagttgccacatcgtttgaaccgtttaaagctaaacgaatatcgcttgggttccaaccaaagacgttagcgccatcgccagcatctttagcagctgtcccaaccactttttcttcatttggtgtactcaagttcaagctaactgattttgcgtatgttgcatctgttgtcccagctgctgtataaccatcattatcttgatcttggtttgttaaaccatagatatcagctgtccgaccgtattttgtattaccaaatactaagttagcatctgcaattgtgtgtccaccagcttttagaccatcgccatcagctgaaacagttaacttccagtcaccagctgtattagcctttggtgtagcagcagctaattctgggttttcaacttatttatcaacaactgttgcccaagctgtcccttgaacggcctttaaattagcgtcactcgttgttaatgtttctgttttattgctatcttgttgatcgtatgaagcgtgtgtatcattaccaacaacgcctaagttagcgcctgttgcatcaaagtttgtgtgtgctgcgtcatacttagcatggttcccaaaatctaatgtctttggtaccatttgtaatcttaagtagcctgaattgccgttatcatgtgtatcaccaaatgaaatgccagcatctgttgtgtcagtcattggtaacttagtaccaccattagctgctgcatcgtcttttggtgttgcagcactagcgatagttgcaggtgctagaattgctaataatgttgatgctgttaaaactgtgcttgttaattttgtgaatttcatgtgaaattcctcccttttttaactatattttctttcgctgcccacccatcccccgtaacttgttacattgtgataatcgttattttttgtaagtctaaataaaatttaatggccaggtagagggtcaatacaaaccaaattgttaagcccccctgatactatgaaggtcgccaagcgagcctttttagggccccattttgtaattaagcgttgcacgtttaaagcccccttgttaatttcaatacccgataaacaaaccagaatgaaacaagcatcaaaatgccactagcagtcgcgacatacgcccatttattaacgggtttcttcactgatgcttgattaatcttatcggcttgttgttgattgatcgtgattttctttctaaagtgccagctcattggtaattggttccaataactattacctttaacactgatggaaatgttataacgaccgggtttcaatcgatcgaacgcccatgagattggcacagtccactgcgaattaggtgcaacatcaacgctgtctgtttcataaacacgcttgtctttaaagaagccattcttgtaaacgaccgccttcaccttggcattcttgatggccattggtttcgtattattcaactgaatccctaacgctggatgcccgtttctgacggttgggttaaccccttgatatttcaactctgggtaaatctcgtaaggcttaccgcgcaaaacgatccccatattgtaggcataactcccggagacattcgaatgattgtcagtttctttttgaccgtattcaataaaatgccaagcgccgtaaatcatccctttggtttgttcagatggcatcgtaatcgtcgcactgacctttttgacctcattagggcctagcgtaatcactcgatcggcccgatgaactttagcaacatccatcaatgtatgcgatgtttctttgataatgccatctttcgtagggcgataaataatccccccaccttgttgcgtcaaactattatcaatctctgaatgaactttaatatttttatcactgaaattatgaaccaaaacctgaatggtttcttttttacccggttcaattcctaaatcaaaaaaacgattttcttgatccacttggcggttcgatttaactttttcaacttcaaaatcgatatgttcccctgtgctgctgaaaccggctggttgctagccaataatagccagccgaacagcccaactgctaaccctgttgtccattttcttaatcgcatttttatcactcaaccctatttttaattgccaagctattctgatttgattgttcctcccaagaaacaagtgttactatgggccaactgatagtgaccacgtcaatttcgttcgataatgaccggtatatcgtttagtagttgccggtacatttaaaccaatactataatcggcacttttttcgtcaccaaagcgataagcccactgcccttgtccaacttgggtatagggattttcgggatcactggtatccggtgaatcggattggaaatgaccactcttagtcatcgtcattaaagtggcactctggcctgatgccaatgtgaagtgctcactattattagtgacagtccccgcatcggtgttcgataacgtcttaacgttgccatttgaaaaggcccattttgcatcggttaactcatgttgttcactatcaacaaacggttttgcttggctaacctgtaattgccaattttgaacgccataattatcggtgaccgtcactgcttgtggcgtgccctgattatgatttaaataatacgtccggtccatgggtttattattataatcaccaaattcccaactgctaggcgcatcaatcgataacattgcctttttataaccgtaagtaatgattcgatcttggtcgccaatttgaggatcatcgcgatacgctttttgccaattctccggttttaaatctggatcttcactgactgaataaatcgtgtaaccctcaatcaccttaggggcgacttgctgccctggtaaaagggttgataaagctgtgccagttttaccagacaccgtaatcggcgcggcaatttgagtccccgcactagcaggctggctaagatcctcatctaaatcaacataccgaatggttaattgatgctctgattggaccacgttcatatcaactgtattcgaggtaactggttgactcacgttatctgcggtcaatgttgccttattgtgtaaggtcgttcctgaggtaaccaacggattaaccgttgctgaaaaactgagcttaacggcttcataattcgctaacgatttggttaacgttaattttccggtcgttgcaaattgcgtttgcgccgcatcactgacagtttcagtcgtcccatcttgataggtcactttgagtgaacccgtttgatacgtcagttcattagtgaccaacggatcattgaacgttatctggttgctagtggcgcccgtcgtgttttgataatcgagcttaaagccgactcgatcacccggactcacatcctgtttggtgtcccaatccgtatccgtcgtttcattttttatcgcttcggttaacgtcaatggtttcttgacgtgtacgatagcagtgtttgaagtggtaccggcaccgtaacttccagaaaccaatttgaaaagattatcgatttctggcgcactatcgtcgttgacaatcgccttaattaggacttgtgctttttgtccgattgctaaattttcgccgagtgcaatctgccattgatcgttaaatttaatgagctgttctccatgaaaatcaccattttcatcagaatatgaaattgatagttccttattattattaaatttcaaatgtgaatcaagtacatcttcaaagaccgcaccccgatctaattgctgaccacttggctgggtgatattgacttggtattcaactgtgtcacccttttgagccgttgttgccgtcttaaatggggcattattaccatcagctgtcacattacgtaccaacttggtaatcgttggtggtgttgcgacggcccaataataatcaccagttggaacagtcgtcccatcgtactgggccattaatgctgctgatgtataggtattcccaacttgattatcatttgcatcatgtcgttgccacttcccaaaatagggtgtttcagtgctgggttctgctaatgatggtccagttgaggtactcgttaagaatttaaatttggatcccaaccgcaggtgcgctaattgttgatcattcaaaaacatgccgcccatattcgttacctgactcgtatcccaattcgtgaaataagcatccgttaatttcgtcatcccacgcagcatataactcatatcggttacactagcggtattccaatcaggataatcaagcgttgttaacttcgtcgcatcaaacatgagtcgcatactttggacgttgctcgtatcccaatcagcaatttctaactgatcaacgccactcttggcaaacatgcccgccatggttgtcactttagtggtctgccaatctttaaccgctaaagtcttaacaccgacagtcccggaaaatgttgaagccatattcgtcacattagcggtttgccacttagaaacgtctaactgcgttaatctttgatcaccgctgaacgtgtaagacaacgatgtatttttgccgagctgccattttgagacatctaaggtttcaagtcttgaacatcccgaaaaagtataagccattgtcgtcacttggcttgtatcccaattcgaaacatctaattcggcaatactagtattcagaaaagtactacttaaattagtaacgtgactggtatcccaatttgaaacatctaaaacagtaatgcccgattgtgaaaaggtactccccagattagtcatttttgccgtctgccattttgaaacatctaagttcgttaaggccgtacaattgaaaaatgtgttattcatattttgaatattagaagtgtcccaattcgtactatttaactgacttaattttttatcaccactgaagcatcttaccattgtggtgacttgcccaagctgccaattcgctgtgtcgccaacagatactaggttggcacaatcactaaacatcgaattcattgctgtcacttttgaaaaatctaagttagtcgcgtcaactgattgcagcgcactgtcactggcaaataacatcgtaaaattagtggccccttttagattagctaacccctgaaccgttgttaagttggtcaacccccaaaacatataggagacatctttagctgtaatttcaccatcaatgctgatatgcgcgattcgcgcaatacaaggcgagttagggaaataccaaggtgtattagtagtatcattagccactttatccggcaatacaccgtctgataaatgtaaggtcgccgttgtatcatcgatataccaggtgactgtgcccaaactggtgcctgctcgttgatcaagttgctgcttttggggttggctagtttttttagtctgcggtgcttcaagtagcgtcgctttttcacctgacgttgctggcgttatggtttgtgtttccgcatctgaagccgcctttttttgaatgacactatttgattgtttagttggtgttgaacctgaaatagcgtcctgagctattttagtgatcgtttccgaagacgcattagcaggcgcttcaacagcatttacttcagtcgtcattaccgaactcgctaacatgtttaccattaataataaagtcatgcataatttaaatagcctcaatacgtatcacctcaatcatctcttaccaatttaattaatctataattcaattaataccttagcatttaacaggtggtaattattgtttaaaattcaaatgccaatttgaatttttgaaaaaaacctatattgacaatcatcagctagacacataaaaaagccgttatcccaaaatggataacggcttggttatttttagttagttaaggatggtattttgctgaccttgcggtaagtgatatattaatggctctttttgattctcaatgaggtcagttgttaaattggtctgataaacatgacgattatcgtaattgaccatataataagccaagttattgagcccgctgatgccttgatattgcgtataatctgaactaccacccgaaccaatattaacgccttttggaattgtgacattatctaagatatgcaaaatatgattaaccccttcggccacgttattggcttctggcatatattgccgactataagcagcccggacaaaccgatctggtggcgtataacttccgggtaacgcctgtgtccccgtcccttgactaaaaagacctgcttgataattaccaaaaggccgctccataaaaggttgtggttgtaaattcaaataattactcaaattcttaatatgccagtctaaatccggcgtattggtcatcaccccaaccggatcatcaattaactgaagcccattgccgcggggttcaatcaccattgttttaccggaacgatccgataatatccaatgtagtggttggttcgcacccattacaccttggtcgctttcaatgatccgcacgttatctaaatctgcagccacttcttctaaagtttgatggttccccaaaacccacacgataaattcttcagccaccaaattcaatttattaggtactggttgtggttcgtaaactgcggcgtgcgcgaaatataactcagcacagcctaggccatgttcattaaaaccatcggctactagatattggtcacccaacttagcaccggcccccatcaacgcatattgattttgaatcgcttgcttttccaaaaccggctgccattgatgttggcgcggtaaaaagagcggattaccatttaattcaaatgaaaaatccatggttcttgctaaaaaatgatgtccatcaacggttgaataagtgagacttgtacacattgtcatttcccctttaatcattactagagtctatgctagcactagagaaattagtaaaataacacaatttttaactcgccattaaaaaaataaataacatattgataattaattggctcttaattaaagtttaacgttttaagcgctaatttcacgctatactattaatatttagaaaaaacgggaggtgtctcatttgtccaaaaaagttctgacgattcatgctattatcctgctctttttcgcgttgattttactctatcaaagtcggtttgccttcttaatttggaacatcattttagcgctgataccgtttgatctgagtttactggggcgcctattcaaaaacagtcgttggcgctacttaatcggagtagtttggttactctttttccccaacgcactctacatgattaccgacttcagccacctctcatcaattggtgttggcttgagtaccgctttccaatttgtggaatacgcgattttagccggcggaatttttatcggtgtcaccttaggcctgacaagtctgttcatcctttatccactttttatccccaaccatcaacgcctcattaaccaagtagcgactttcggtgttttaagcgtttgttcctcagtcgccatttacatcgggcgctttttacggatcaactcgtgggacgttttctatcaactacacacaacaatcgcgagcgttctcagcattttgaaccaatctgatttttggatttttgtggtggcattttcaattctacaactgatattgatgctgatgggctaccaactagcacaactcgatgaaatgtaacccaataaaaaaagcccctcatactgttttatacccagtatgaggggctttttcactacttagctgcgcttatttttgccaagctaagtaatgcgcaactttaaagataccgagaaccactagaattgcgcctaataaggtccacagcataactgccccgtagagcggtgtcatcagaagaattatccctgcaacaatactcaagaccgcagagaatatcgtccaacccttagaaactgctaagcgcactgttcccaattccacaaagccttctaccaaccacgtgattcctacaaaaatcccgactagtaggaataagtaggttgcgctagcagctaaattaacgcatacaaagatcccaacaatgagatacaaaaggcctaagagcaagtgccctagtcgaacccatgtattttcatcaacttctttaaaaattgaaaggatgtcgaacagcccgataatgataaaaacaacacccaccatcaccgtgacacccatggctgattgcccgggtaaaaacaggattaatagacctaatattaaggacaataagccattcacaccagttgcttggcgtaacttattcgaaatattctttgataacatcttgaggacttcttccgtaaaaaattttcaatctttagttttcagagtcgaccgcttgaatgacaatctgatcatcaactaaatctgcctttaagtctttgacatctgcatgatcgaggtaaaaatcagtgaccttatctctgatttgttgttcaataacccgtcttaatggacgagcccccattgcctcatcgtagccttcttccatcaaccaatccttagcttcttttgaaacaactaaggttaattcttttttagctaatgtttgttcaacgttagttaacattaaatccacaatttgtgacaagtcagctttcgttaaatgcgtaaattcaacaatcccgttaaaccggtttaagaattctggtctgaagtatggtgctaacttatctaataacttagcatcttcttggtcgttcatggttaatttttcattaccaaaaccggcattagatgtcgcgataatcaccgtgttcttaaagtcgatcacgttcccttgaccatccgttaagcgaccatcgtccatcacttgtagtaataatgttaaaacttgtggatcagctttttcaatttcatcaaacaagacaattgaatatgggttacgacgaacgcgttcggttaatgtattggaattatcgtcatagccaacataaccggctgtcgtcccaatcaatttagaaacagctgtccggtcagcatattcactcatatccaaacggataatcgcttctttgttaccaaacatatctaaggctaattgttttgctaattcagttttcccaaccccagttggaccaacaaataagaagctcccaattggttgattaccttccgaaaaacctgctcgatttctgcgaatagcccgcgctaccatttcaacagcttcatcttgaccaatgaccttatcttttaagcgttgacctaagttcttcaagcgttgaatatcattgctccccattttagcaactggaatcccagttaatctttcaacagattgcgcaatatcatcaacagtcgcaatcattacggccgcatgctgatcattattttctaattgcgtcttaatcttctcaatccttacttttaaatcttcagcagcttgataattctccgcctcgacagcttcggctttatccgcttctaactgtttaagttcagctgccaatttagctttatctgtttctggccgtttagctgctaaatgagcggcggtcatatctaataaatcgattgccttatctggcaacgtccgttgtggaatatattgaacagaatagtcaacagccgctttcaaaacatcatctggtagttcaatgtgatggtgtttttcgtacaaacctttaatcccttgcaagattttaaccgtatctgctgcgctaggttcattcaccagcacatcgttgaaccgtcttgctaacgcggcatttttcaaaatagtattgcgatattcatcttgcgttgtcgcaccgatgaccgtcaattcaccacgtgataaagctggcttgataatatcagctaaccctttgccgccatcttcgccaccggttgaacctatccctaaaatctgatgaatttcatcgaaaaagagaatgacgttcccggctgcttttacttctttaattaaatttttaatattttcttcaaacgagccccgatattgtgtcccggcttctagtgatgacaaatcgattgagtagatttctttatctttaatggtttcaggcacttttccagccacaatttcttgtgctaatccttcaaccaccgcggtcttcccaacacctgcatcaccaactagaattggattatttttagtccggcgacttaatatttcggctgtttcttggatttcattataccggccaatgacaggatctaataaaccatcccgtgcttcctgggttaagtttcgacctaatttttcaagaatgccaccttttttaagagcatgttcaccattttgcttaatttcaatttctttttctcgattaggtaatttaccagttgcccgatactgagcaaactcatccggtgataattctcgtccgttaatcacatatcgcgctgactctgaattccccattcttctaaaaacttgattgaagatatcatccatatcattattaaaaaatgggtcatttccgtacatatttgccatacaactgcacctccattattttaaacattaaatgaccattagttatcttatcaataacctaatcattttgcttatggttctattataacaccttttagcactctagcaagaaaagtgccacgaagttttagtggttaactatattcaaaattgataggtagtgcattttttcacgatgttaatagtctagcattcgaattaatcccccacacaacaccggttaaatcgcgtccaaaaaaagactagctcatcaatgacggactagtctttttcaatattactatttagctttatttttcgaaccaccaaaccatttatccgatatgacaatcatggctggtaagattgttaaggccgcaatcagtgaatataacgtatccaagacggtgattaacccgaatgagctaagtactgggaagctcgtgaagatcaatgcggcaaagcccccgataacagttaagcctgaagcggtgatcgcttggccaacgtttgtaacagcaacaataatcgcctcttcagtggacttaccaagttgttgctcttccttgaaccgttcgagaattaaaattgtaaattctgtgccgacacctagcactaaggaactcaaagcaatcgttaatggattataagattcgcccaatagatggagcgtcaatggtgataatcctagaacaattgcaattggtaaaattggcaataatgccatttttagatcgcgatagacagcaattaaaatgaccgcaataatcgctaagcccgctagaatgattagcgtatggttgacgaccatgttgccaaccccaacgagcatcatgacgctatcaccggctgggtgcacatctaatgttgtcgcatggtgtttgagatcccgattaatatggtgcattaatgtccgttgttgtccggtagttaaggatctatcgactttgaattgaaccattgtataatggttattcttactcaacatcgtccctcggatagtccccggaattgttttaatgccttcgttaatctcagtttgtgtttgttgctttggtgtgccgcccatttgacggtaagtactatctaatgtcgtgacaccaacgatgtcttgatacttatgattctcgcgattggcgaactgtgttgttttagccaagaccgctttatcgcggacgtcatctgctttaacaagataagtcatataggtggttgaacccacttgtttttgcaagtacttcgtatcctttagtgcttgcatatcttgtggaatcaacttggttaagttcgtttcaattggaattcgtccttcaacactaaaacctgttgctgctaaaatgatcccgactagcgttaaaattttagcgtgtttaatgacgaattgcgcgtatttccgtaacgcttttgctaagcctgacgttttaggtgctgattgtggcttagcagttgttttactcttacgatctaacaaggcaaagcttgagaacattaataagaattcaacaacataagctgtggcaaccccaattgctaaggttaacccgaattgttgcatcattggtgcttttgataggaacatcgttaagaagctgaaaaccatcacgatcaaagcaaccccgaccgcagggcccatcgtcttaattgcccgttttgtcgcctgttcacctgatgctgatttgtggaattcttcctcgtagcgattatggaattgaaccccgaaatcgatccctaaaccaataatgattggtaaggttgccatcgtcgctaaggttaagtcaatgtgtaaccaacccataatcccgaaagtccaaattaagcctagtaacacataacatagtgataatagacgtcgacgaactgggaagacgacgaacaaaacaacaaccataatgataacagctaaaactaacatcgtcgccattgttttcataacgagcggttgaatcccacccatgatgactggattttcagctaagcgcactttaaggtctgattggaaaccagcttgcttaatatcgtgccacacatcatgaacgacttggacattagttgtcatatctgttttggctgccatattggccatgattaacaagttctgtccatttttaggtaataatgcggataattgtgaacgcacatgtcccttgctatcaagcattaaatcacgtagcaatgccgttgacatgtgttccacttttggcaaatcagccaacatttgtttttgaagcatttgttgttggtcttgatttaaaatcgtgaacagatattgttgaacctttacttgttgcgttttgtctaattgtttcatcaaagttgctggcgattgattgccagcttgtgccgcagccattttttgttgtgacgttaataatgagagcccgtattgccccatttgttgttgttgctcaggtgttaaactcgcctgtaacttagtctgcaacgccgtcttttgagacgttgttaagttcgccattaaatctttttggagcttgtcagagcccttggcatttccgcccatcgtgctagcggcgttgctctccaattcctgattgagtagcgaaacgacactcgtgctactgcggatatgatcgaccttgttaattttattttctagggccaccactttcttcatcgtggtgtgggtcacaatctgatcctgatccccggaaatgagtacatacgcggaaccgccaccgaagttttcctgataggttttggtgtctttgtaaacttgcgaattcgtatccacgaatacttcattacccatattcatttgaatattggataagccgaatgctaagccaatcgttaaaagcacgacggcaatgatgactttgattgggttgttatggataatttgactaattttagtaaagaaacgattcgtcattagtagtcctcctcttaaatttaatatgctactcagtataaatagctgatagaatggaaggaagacacaaaatgacagatgtgtaccgtttttaggaggttattagatgacaaaaggggaacaaacacgtcaaaagattatcgaagcaaccgtcgcactcatgctcagcgacacccgggcgtccgttagtcacatcattaaacaaacgcacgtttcgcgaaccaccttttaccggcactttccgagtctcggcgatgccattctagcagccaccctgacccgcttccccactagttaccaatcaatcaccgatccagctgaactcttagagctcgtcattaatacacttgatcaagacctcgcattcttcgttcactttagcgtttataaggaagaattcgatttcttattcaagcaattattttttaaagtggccaataacgttcagattaccctgcttgaccgaacaccggtcaacaatgagttagtttaccgcgccatcagtggcatcgttgccggttggatgacaaatacaacgacgatcaaggccgccgatgttaaagggtttattcaacaaattctgaatctctaaaaaaataaccctcggcaatctgccgagggttatttaagaatctaatgcgcttgatgagaaacccctgtttttacaacatctgatttcttgggtctaaaacgagcgattctgctaataaaagttcactgtaaatttcatcaatatcatcggaactcgctaaatgatttttttccaactgaaataagtagtcccgttcagcatccagagcatgcattaatgcgcggcgttgttcgccgccttgcagcttggtcaatcccgctttattggccgtaaaagcgtgccattgttcaaaaaacgaccctaatgtatttttccgaatttgatcccgtaaatcataaatgacaattgccttaacagcgggggataacgccattgcttcaagcgattcaatcccttttgtcaccatatcatgacggattcgtgccaattctgtcgtgcgaatttccgcatctccatcaatcaacagtaagaacttaaataaaatcgtgggcactaacatacttaaaataataaccacagtttccacaacgatgatgaaattaaataactgcaggctaatttgattagcaatcgaaaatgtcatcgccagtgtcactgccccgtgcacaccaacgatcaaccaagtaagtgagccaaataagatttgtgagtgactgactaggattcttgccaaactaatcccgaaaatcacaaagaccgcactgtttaaaacttccgtcatcagattaatcaattgaatccccaaatgcatttgccgtggcgatgaaaaacggctgcgattggcttcgctattatgaaccagccccgctgttacaactgcgataatgccggaaacctcgatcttttctgccaaaaagtaaatcaaaaaaggcgttaataaataaaataaggtctgtgacgaaatcacattgcttgtcgaccgcacaaaatactgccgaaacgccatcacgataaaggccaaaatgataaatggcccgtcgttaaccacaagattcctgcttgtaataaaataatgcccgttgcatcattgaacaacgattccatttttaatatattcctgattggttgagggattttacgcccttcaaccacggcatcaaaggcggttgcatcggttggggttgcaatggcgacaataattaacgcgaccggtaaactcaataacaacagacgactcgtgataacagttgctgcaattgccgaaaccacggcgaggataactgcgacccccataatacttttcacttttttgccaaccattaatagcggcgttgtctggccttcgaaaaataatagtggtgctaaaattaaaatcatgaagacttcattattaaagcccagcactaaatggttcgtccagggaattaccgcgacaataacgcccatcaataaattaatgtaagtcccagctatgtgtttggtataccgagcaataatgttactaaaagcgaccgcaatcgcgatcgctaatgtcgaaattagcagatccatatagcgctccttcattttcaaaataagtattgcgataatttacagtatatactactaagccccatttaaaataaaaaaataggcatccaggctgaaaaacacacgatccctattcctaaattaacctaacattttaactaagtgttggacggtgccactttcaaacataatatataatcccaagccgatataaacaatggcggtgatatacatcccatatcgttccagaatttcagcgaccttcggaattttaatcagtaagtagccaacatagcaaaaaagacttaacatgaagaagaaagtaatcaatataaccgccaatgtttgaactgttgattgggcaaaaattggcacataaatcccgatattatcggcaccacacgttgcaatcgtaatgattgcgacattcataataatattgcgccattttttcatctgactctcaacgacttcatcatcgtcactttctccgctgattaataaccgtaggcccatcaaaaccggtataatacctaataatcctaatagccattcttggggtacaaaacctagaatgaatgccatcactaagcttgcagcaactaagacacttgtccctagcaaatccccccaataaacaagccaccgttccttacggtttacggatccaaaaataaccattaaaataattaagtaatcaatgctcgtcgaaatataggctgtaatgccagttaatattgcagtttgcactttatttccccctctaaagcaatttatttaatctcacatgttgataataacatatgaaggagaagacatgttaaaaaatgaagctattccgctaaataccgttaatttaattcctgaacgtaacctggaagaatcaaaacggattttaaaattacttagtaatccgactcgactccaattgttgcacatattggcacagcgcgaatgcaacgttggcgaacttggcgaactattgcaaattgaacaatctatcgtttctcaccaactagcaatgctgcgcgatcaccaattagtaagtgccacaaagcacggtaaattaagctattataaactagatgatccccatattttagacatcagcggcgaagtactagaacacgctgatcacgttgtacgtggaaagcaacatggtcaataaaaaaaagactaattcccttttgggattagtcttttttgcttaagagaatcttttaaaccaacaatacgttactttatggcgcagccgttaaatgccacttcaatgttgatgtgtattctgtacggtaacgttcagtcgtttctgggacatgcaggccaatactgtaatcagccgttcttgcgtcaccaaattgatatttatgaactgaatagccagggatatcataactgaccccgcctttattgtcgccgtcttgattaaggtactggccttttcgttcgtattcaactaattctaacggctcagctccgggtaccaagttaaagtttgatttagttactactttatcctgcgaattcgaaacagacttattaccttccgtattcgtgctcaatgttgcgttattaaactggagttgtgcgccggacagctcaactgcttgttcctttgaatctatcgtggcactgccatgaaattgttgttcctgtgcaacactcaacgtccagcccttaatgccccaataatcagagatttcaatgccatatggtgttttttcatcagttggtttctcaatttgtgccggcaaataaaacgtccgttcactttgcgtatcgtcgaatttaccaaaattcagtttacttggtaacgccgtaatcgctaagcgcgttttttcatatctaaaggtataggtcaccgatttttcttcaattactgggtcaacatctttaatatccgcatagaccgcagcgtttaaatcagttgccgtcgtaaaatcaactggcgtataaccttcaatgtaggcgggccgaatcttattaggatcttgcccatcgctaatatcagttgcttttaatgctgatattttggcatcaattggcccagttgcaacgacttcgttagtaatctgctgccccgtttcacgatcaatatagctaaagtgaacgtcactattcttcgtcttttcaatcgttactgacgcgtcagcttgcccgttcataacaccctgattagcttgttccccagaatataaaacaatatttttaagcactgtgcctatcacaacaccttctttgtctttagccttataggttaatactacattctgtccaggtgtcatttttttcaaattaatctgtttaacatctgctggggtttcaactgtcttatcgctatatgtcaatttaacagagcccggcactaattttaacccttccttagctaggtcatcggccaagacaccgttagacatatcagctccgttactgctgactgttaacttcacttggtaatcaagaacatcatttacatgcccgaccgtcgccttttggtacgtcgtttctttttcagtttcatttaaaactttcttttcaatttcgacaggttcaacctcaacagggattttcgtattcgctgtagctgtatcgaaattgccagtaccactctcagtcttagcaaccatgctactattaattgtttttccagaagctttaccattaattttggcatcgaaactgatcgatgaccattcattttcggccaaatttttgggtaatctaaccgttaacattctagtcgtttggttatacttactagcatcaattgctacttgatcgccattattcagagttactttaattgtactaggatcaatatccagttcatctggtatttttgacgttacgttaatatctttccattcactactataacctaaattatgcgttttcatttcgatggtaatattatcttgaacgtgatttttttgatcacttgtcgttttatttttataggtctctgccgcttctgggacaactaagcccgcagtcgcaatccctaaatcatttctaaaatgataaacggtatctggctgaaaagtttgccaattccacttagcgctatacgcagaatcacttcctgaataaacagtagccccttcttttagatttttaacttcgatacccgtaccatcaaagttggctggcgaataatcattcattgcataatcagataagttatatccaccatttcggtgataattcatcgcgttaaatttggctgggccatcttcaacacccatattaaggaatagtttatatttaccatcggcaatgtacatcccagcgttattcccttgcgcagaaactggcacgccatcgttaccatttaacgaagtatctttagcaaaaaagatcccgccatcaattgctgccgatgtcgcattataaatatatagttcctgttgaacagatggtttttctagtgacggccgtaatagatactcaagtgtgaaactggggacacgccccactatggttgtatattgccccaccatttttaaaattgtctgccccttggcgtctttggcttgataatattgcacacctgtcagtgatccctgtgctgatgtcgatgtggttttaatcgttggtgccgtggaacttctggtggttaagagtgaatagtcatacgagccccccatcccagatgttgatttgaatgaagactcgacaatcttgccattatccttaatgaaaacgttcattcttggtggcatgtcattccctattatcccgccattgccctgatcaaactttaaggtcccatcactattaccaaaagtataattaagacttttattagccgctttatcaatatcaatacttgcaatcgttgtttgctttgccggttgccaacctgtcacgccatcatcaatagtcgctgtcggcattattgtatctcgtgattgattctgaatcacagacttatctcgatgactactcgatgactgcgttgtcgtctcagaagaagacttttcagatgacgtcacttgagattcagatttagattcagatttggattgcgtactcactgattgttctgagtgactacttgtttttgaatctgttggcaccttgatttctgatgaattattctgtttctggactgcattgacaacgttctcattaataattaaagaacttattagtatcagtatcaacattaaccaggttactaatttttttcaaaaatacccctccgttatctaaatgattaattggctctccgacagcaacatttcagtaaaatcagtactactcaaaactcatcatcaaactcttatcaatgtcattcacatttaacgtcaggaaaaatacacgaccgtaacaatatctaaatagtatattattttagtaacgattgcaagtcggtttttcgttattaaactgtacacaatctataaatcgcttcacccctagataaaaaagactttaaataaatagtgcctatttaggccatcataaaagaccgcctcgttaaaccgagacggccttaaactcattaatcaattttttgtaaccaaatcatcactttttttgcgaccacttcttttgtttgaccttctattgcgagtaattgaccgttgatttctgccccaccagcaaccgataagaccggcaagacagttgcatccccgacagcgccctggatctgtgcaaccatttgaccagcgccatacccaccgtgtgtattaaacgggatgattgttttgtcagtcatatcataggttgctaggaatgtcagcactgcttggggcagggccatattccaagtgggggcgccgataaaaattcgatcatactgctcaaaatctggaatggtcgtttttaatggtggtaattgattttgtaattgacaccctcctgattaataaaaatctggtttggctttattttctgagccgggttcccataacccaatacttgcgcggacatcattgcgtttaccggtcaaattatcaacaacgaattgggcgatagcgtaacgactgatttgcgcccctaagaatggttcccctttaggactagcgacgtaatcagtgcggttagcgtcatacaaccaagtcatccgcatataagtgtagtcgagatcacttgcttcaagggcttcattgccgcgatgctgcgccactgaactacccatcattttactattccaagtggcgaaaggttctgccacttcgccgtagacacttaaaacacctgcttggataattcgtttaacacccgtttcatgcatcgcttcgatgacaattttggtaatcgctaaattatcaaagttcatataaatggcatcttggttttgcatcacttcgattaaatcatcaatccgactcgcatcgccagagacctttgtcacattgtcataaggtaaattagcggcatcactcccaaaaagtgtgagttttaaagacggttctgcttgtaaacggggaattaaaatcgctggaatttgaccaccggacccaataattaatacgtttgtcattatttattctcctttaacgctgctaaactcgtcccaaaaatttgttcgattgctgctggatcacggtgatcgaagaattggctttcacctttgtccaaatcattcatcgttgccatttcagctgtggttaattcaaaatcaaagacattgatattttcggccatccgattttggtgcacagacttcggaatcaccacaatgccgcgttgaagtaaccatcttaagatcacttgtccgtttgatttaccataacgactaccaattgcggcaattcggtcatcagtaaagatattgtgtttaccttctgcaaatggtgcccaagcttcaacttgaatctcttccgcttgtgcaaaagcaacttctgaatgttcttgataccaaggattaacttcaatttggttaatcactggtttgacattggttgataaaattaaatttttaagttgatcggcatagaaattagaaacaccgattgcgcgaatcttgccggctttgtatgcttcttctagagcccgccatgccccaatcacatcgccaaaaggttggtgaagtaagtagaggtctaaataatcaacccctaagttttggagtgattggtcaatgccttttttagcacgttcatagctggcatctgatacccagagtttcgaagtaatgaatagttcttcgcgcgccacgccgctgcgtttaatggcccggccaactgcggcttcattatggtaggctgccgctgtatcaatcaaacgataccctgatgcaatcgcatcaaccactgcttgttcacattctgctaaatccgtcatttgaaaaacaccaaaacctaattgtggcatttgtacgccattgtttaattgcaccatatccatcattgataacctctttttctaattgatgactttagtatagtgcgcagtgactcacttgaaaattacttaaaaaacatgctagtatacattaaacgtatactaaggagaacagcgaatgttagattactatttattagaacaattgacgaccttcgccaagactggcaccctcacgaaaactgctgctgctttgaacatcactcagccatccgtcacacgcggcatgcaaaagttggaggaggattttggtgtccagctgtttgaccgtcaggctaatcgcattaagctgacaccaacaggtgagcttgccgctcgagaagctgaacaacttttgacagctagccaaacgatgctgactaaaattcaaaatttcgaccgcggtcagcactttacgataattggcgcaacgattcccggaccgctaacccttgtacctaaccgtgatgatgtgcaaatcgctaaaacatttattgcggtcgatcaaattagtaatacgctaaaaacagaccaggttgccctaatcttttcagatcaagaaatccttgatacgaccatcgaatctcaataccttggtcaagaacagcttcaaattaatctcgatcaattcacaacgtttgctagccaatcaacggtcagctttcgagatttagccggcatgagtttcgtcgtcatgcgcgcaatcggcccctggagcgatatgattaaacaagatattcccaacgcgcaatttatgtatcaagacgaccgcgccgccttcattgagatcatcaaacattcaagcctaccgtttttcacttccaacctctcacaaaaagatgctttcttcaacgaactatcaccacatcaattagaccgaatcacagtcccgattagtgatgaacaggccaagatgccaatttacgcaaactatttaacccataataaacgccaaatcgcctccattctagaaacaatacgagcaaattggccataaaaatagaccaacacgctctaggtgttggcctattttctaaatttgatagccctttgttttacaaattggtcaacttatcatatttcatcaagccaacggccaaactcacaagcgaggtgtaactcgtgttgtttaatcataaagttgggcagcattgctggaaactcgaccaaggctttaaaccttatgccgttttccgcttgtttaagttggtgtcggacaccgccaataataaacccattcgctaatcttgccgtgccgactaactgttcttcatatccttttgaaagaacagacttcaaatcttcagtatcaccataatgcgcataaaaattagtcggcaaaggtgacccccccagtaaattctagtacctcttgaaccgtgttactcatcccttttaaaacataatgatctggattcgtatttaagttaattttaaaatgcgcttgcgtatttatcagcatgatatcatcaatctgactagcaacttcttgaatggtgatgccgcttttgggtatataaaaatcgacttcactaaattttcgtcttccaaaagaaagtttgacagctatcaccgagattaaattgccaagtttatattgattgcttagtttgcttttcaaatcagccatgcctaagttcatcttaatgcttaagagtgcttcgcgcattttatcgatatttctttcagcttgccatttattaaagtcattagatatagcgccagtgctaatccgcttcagccttttgtagttaacttttaatcgcttatattcccacgatagaacggcctcttgagggatttgctcattattaatatagatagcctcctgattcatcttttacgggtcactcccatctactctatatgactcatcatacttataaaaatgcttattatccagtcgtgacatctaaatgatgggagaagttctatgaagcaaaaaagcgttatggtcaaaaacaccataacatctatttttcacatgcctgaatattaaacgttaaattagtcctaatcactttttattttgattcaaaccttttaatacctgcttccggaagcgtcctgggaacgaacgcgcaatcatgaccgttaagcggtcgtgaaaattgttgaaataacggcgcttgggttttgtatcggtagctgctctgtaaaagagattggccaagtcttctactgacgcgcccattcctggtgcatcatcacgcaacacatcagccatatatgccaccaatggcttataggcagtatctttcttcaaattcttatagatattctcaaccgcgactgatccccaagatgattgggttccaccaggttgaacgacgactgactgaatcccaaattgctcaacttcaatatccagagtatcgctccattgttgtaatgctgccttggtggcgtggtaatatgcacccaacggcgaatagatatcaccaccaatggaagaaatattaacgattctgccaaacctttgttgtcgcatccttggcaaaataagttgggtcaatgtaaccgcgccgaaaaagttagtttcaaactggcggtgaatatgctcagttggcgtatcctctacagggccattctctccgtacccagcattattaatgagaacatcaatgcgcttttgctcttccagtactgtcttagcaaatgacctaatcgattcatcatcggtgacatccagtgaaagtgcatggatatcctgacccgtaggaattttcccaactcggcgggcaccaccatatacaatccatccatgatctgcaaagactttcgttgccgccgcgcccatgccattagatgcacctgtaataatcacaactttttgatttgtcattgatattctcctcttatgtgcgttacacttgtaacttgtatttatgttgttgagtatagaatgacttttaaacaaatacaaccaactagaccctagatgtgacacataaggagtttttgtaatgtctacagcgaccaaacaaacacaagagtatttactaggtgcccttcaacgactacttcaaaaaaaagatttcatggacatcacagttagtgaactggcgaaggtggctggcgtttctcgaatgacattctatcgtcattacaagaatgtgtatgatttgctcagcgtcaatctacagcagatcatgtcggaagtaccttcttatgaatctctagaaacaaaagattatgaaacggcgattgtccgataccttcaatttattaatcaacattcagagttcatcaacatgctgttgagggctcagcagcagaaactattacatgaaaatattgcagcagtcatgcaatcattaatgactgctaaacaccaatctttgccattcaatggccatgaaatgcaatactacattgcctaccattcgagtggttacgccagcgtcattgttgattggatcagcaatggacgacaggactcgtatgagcagatttcggctttcctctataagaatattagcttgtgaccggtcaaactgtaatgtcccctcacaaaatacttctagtgctgcagattaaattggttctagcacctgcaaatgcaatcctatacaaagatacggtgaattgtggtaaaaaaataggctagtcctttgcgggactagcctatttgagtaaacgaaaacgtgcttctcaccctagctttttccgtctagttacaaataagcgcctatcttccaaagttcggaaggtaggcgcttattctacactatactcagaagctgaccagggtggtcagcactcttttgaaccatgctcctggttgcaacaacttccgcttaatctaaaaatcaccttaatcttaaaaccaagattaaggtgatttttattaatgctcagttgctaaacgcagccatccgcactatattagtttaatttcttcttgcttactacgtttaagttttcgtctaaatcataaacaactggttcgcctgttgccatttcaacgtccatgatgtcttcatcagagatgttttcaatgtattttgttaaagcgcgtagtgagttaccgtgagctgcaacaatgatgttttggccgtcgattaattttggagcaatttcgtcttcccagaacgggataacacgttccaaagtaaccttcaagttttcgccaccaggaatagcttttggatctaagtgtgcgtaacgacggtcatttgctgctgaaccttcgtcatttgcatccaatagtggaggaagtgtatcgtatgaacgacgccatacgtgcacttgttcgtcgccccatttttcagctgcttcagctttgttttggccttgtaatgcaccataatgacgttcgtttaagcgccatgattttgtttcaggaatccataattgatctgaaccttcaagtgcatagtgtaatgtcttgatggcacgagtcaatactgatgtgtaagcttggtcaaaaaggatgccttcttttttcaataaagcaccagcgttttgagcttggcgtacgccttcttcgcttaagttaacatcaacccaacctgtaaattggtttgataagttccattcactttgtccgtgacgaataaaaactaatttagccatgtgtaagtaacctcactttttttatttttactctgtccattttacactgtttccatcacaatttacagtcttatcttttcagaaaataatgaacttcaatttaattgatatattgcccgggtaatactgcttattagccaagcaaatcatttttatctaagcttcaatctggccgttatgaattagattggcatccaaaaaccaataatcttctggatcacccactaagcgactgaacggaacaggctgaatcccctgcccttctaatttttcaattaaatacgcccgtaatatccacggattattgatgtgttgtgtttccaaattcaatacgttttgaatggtcccttcagtagtgcccaaatctgtcgctacttcagctaaagagagaccagttaaagcaaaattagcctgtaattcacgagtcgttgcttttctttcttgcggatttaatgacatccaaaagacttctttctatatctttatttttgatcgacactttttgtttcttttaataagaagagtgctgctaaaatggcaatcaccattaagactaatgaagtcgtgacaacagcaatcatccctttatcaaaagctgtgaccaccatttgttgcaccttggcagcatacggtgttttcactaattgttgactccaagcgactgcgtgccctgaaaaggcgcccgcttcgactaatgcttggtgaataccagttgctgcagcctttggcattgaactcccactaaagccagcacttaagctactctcataggcattcgtttgtgataaaccaagaatcacgacaccaacggtaatcccgatttgacggaaaacattcaataaaccggatgccatcccaatttccttcgggttaatattatccatcgctgctgtattgatcattggattgataattgcattccctaacccagttagcgcaagcaatggtaagagttgcatgtaagtaaagtcagtcgttgtcacttgtctaaaaatcaataaaccaagtgccgaaactgtaaacccaaaagcaatcatccattttttaccaaatttataccctagaacacccgtaaatggtcccaaaacaagtgaccataaactcattggcaattgatgcacaccggttgaaaaggctgagtagcccatgtaattttgcatcaaactcgtttgataagcggccaaggcaaagattccagcgcctaacgagaaggccaaaatcacaacacctacgaaatggcgattcgtgagtaacgtcaagttcatcattggtgcttttgccttcaattcaacaaagacgaagagcgctaaaattaaaacggaagcgactaaccaacccataatccgcatatctgtccaagcccagtgcatgtgttgttctttttgaattaacccataaatcccagagaataatccgattgctgacaaaatcatacccataaaatcgattgattcgcctgcaccatatgctggtgtttctttaacattacgaatcactaagtaaaccgaaataatcccgactggtaagttgacgaagaaaattgatggccaaccgaagttttcgactaagaagcccccaaccaaaggtccaatggcagttgaaaaaccaatgacggagcctaaaattcccaatgcagtcccacgttcgcgaccttcaaagttcgatgccactagcgccatcgataaactcatcataccggagccaccaattgcttgaaccgcacgaccaatatccaatactaataagtttggtgccagtccgttaacgacagaagctaccgtgaataaaatcatactcatgatgaaaattttcttacgcccgaacatgtcccctaatttggaaacaattaacaagctgaccgcatacattaacgtgtaggcgttcaatacccattgcaagttactaaaagttgttttaaaatcaaccgccatacttggcaaagccacattaacgacggtcacatctagtagtcccataaagacccctagactcatagcgactagcgctatccaacgatttgttgtttttttcattttactatctccattttctcgatctctcttatttgtgcttccagccagtagacctttgctttaagcgttgtgattacaaaatccattgagcgaacctgccactgataataattggtatcggtcccctcttcatcccgtaaatctgttagatggtttttgacacccatatagacgtgtaaatcttcagctaactcatcgcggtaatcttgtaaaatactgatctgttcttcggaatcgatgtagtgcatcccacgcatcttaaaccgataagcatcatcccacttcgcatcgtgggcgactggtttagccattaattcagcaaagtaacgccggccttcttcagtgatatgtgcaatcttcgtaccacgcgaatcttgatcagcttcatcaaacccaatgcagcctttgctttccaatttatctaatagcgggtacaaaacgccatttgaaatttttcgacgaggtaacattgcattttccaagataatccgcaatttataacccgacatattccgactcattaaggctgataacatcagcaattcatacataagttcataacctctctcttcaatcagtcttttcgacaggtctttaagacttattaagtatagttctttccgacacatttgcaagtctttttttcacaaaccacaaaaaagacggcccacattcggttggcgaatcgccaagcctcgtgtagcccgtacttttgggtgcttaatttaatttttattgtgcttgaacactatctcgttcaaccaattcaactggtagcattttttgttgcatccctaacgttggtttttcgattcggttcaacaataaccgggtcgcttcttggcccaacgctaaaataggttgtttgatggtcgttaaccgcggtgtcacgtactcgcaccaatcaatatcatcgtaaccaataatcgaaattgactctggtaccgcatgacctagttcagctaacccacgtgctaaacctatcgccagctcatcattgacggcaaagatagcagtgacgccactatcaattacctgttgggctacttgatacccaccttgtttagataacggcgtcgttatttgccagttcggattaaccgtgatttgatgactaaccaaagccgcttggtaaccaataaaccgctgctcgatattccaagcgcgctgttcaggcaacacaatcccaatttgacgatggcctttttcaatcaggtaattagccgccattcggccaccttccgtatccgctacagagatctcatcactttgatgttgcttttcggattgatccaacagaatatacggtattttacgttgtttcagatgcccctctagtgtctcttcttcaatatgcgagaccgctaaaataaagccatcgacattccgccgaaccaactctttcagatagtaattgaccttctgattattctgacccgcactataaatcagcggaataaaatcatactgataggcgacttcttcgaccccttgaataaactgactaaagaagggattattgatatccggtactaaaaccgcaattgttttggtttctttattaaccatgttctgggcaaaataatccggttcgtagctgagtttttcacgtgctgctctcacccgcgcaatcgtctcagcgctaaaccgctgccctttattatttaagattagcgaaacagttgtgaccgatgtttgggccaaggcagcgacatctttaatcgttacttttcgtaccacgttaacttcccccattgaaaaaccctctatcatttaaaaacgcccatagccgactaagccatgagcgccttctaatctattataactgaatatccttttcatatggaattgaattttgtgcacctttagtttgcacggcaattgatgaagccttattggcataagtcattgcggcttcgatattactgtaatccaattcgagttttgtacttaacgcaccgatgaaagtatcaccagcagctgttgtatcaactgctttcactttaaaggcaggcacaaagccagttgcagttggtgttgcatagaatgaacctttagaaccaacagtgatgatcaccactttgatgcctaatttgaacattgcttcagcgttggccttcattgaagcttcgtcagtgactttaatcccagtgatgatttctgcttcggtttcgttagggacaatcatgtccgtcactgctaataattcagctggaatattcttgatagcaggtgctggattcaaaattgtttgaaccccgtttgaacgcgcaatcttgaaggcttcgataatggcaggcactggtacttcgaattgcgccacaatccggtcagcttctttaatagctgcttctgcttcgtggatatcttcaacagtcacgtcttggttagcgccaccgtaaattaagatactattttggccgtgagcatcaaccatgatataagcttggcctgtcccagctgtttctgaacaacgaacgtgatcgacgttcatgccgtcttttttgaatgtgtcgagcatgaaatcagcggcaccttctttaccaaccttactaatgaaagccgtttgggcacctgaacgaacagctgcgattgcttggttagcgcctttaccaccaccagcaactgcgcggccatccattgctaaagtttcgccaggttgtggaaaacgctgaacgtttaaaattgtgtcgacattggttgaacctaatacgattacttttttcatttgaataccctcctggttgttaaaatacaacgccactttctaaaataatgttggaataaggtgtcatctcacctgttctgacaaatgctttggccttatttaagtcttgtttcatttgtgaatgattaataaattcgattggtgtctccccaattaaagctttaatcgcctctaattgttctggatttgctgttttaatttcatttgctaagtaaactttttgcacttctaattcacttaagatatttgttaaaacttgaataaaactcggtacaccattttcaatggccacatcaatcttcttcgtaccagctggtactggcatgccagcatccccaatacttaatgtatcgaaatgtcccatatctgaaataacgctcgaaatttgtgtgttaatcacctttgtttttctcatgtcaccaatctcccttatctttatttaataaatgctgtgacagaacctgccactaagactaataataaaccaaccattacggcgatcatttctttttttgatttcttttcttttaagatgtaaatcccaccgattgtcgcaaagataacacttgtttgtgataaaacaaaaccagttgctaaaccgttgacagatggttgtgctgaaatcaagtaagttaatgccgcaaaagcgaagaagaacccactgaagatgttcttatatgaagttgcttctttaaatggtttataatcttttttagtttgtgttacgccgaagataatcccgacaattgtcatcccaatggcttgtggtaagaaaccttggaagccatcagcgctgactgcttgtggaaaggctgaataacctaagtaacctaattcaccgactaataataacaagacgcccttaacggcaccactcttgctagcacttgatttatcttcgctccaagcggtgagataaacgccgatgataattaatgcaatcgctgtaaaaccgattaattttgattgtgaacttgaccagttacctagaacgaagacaccccataaagatgccccaactaattgaaagccggttgtaatcggcattgttctagaaacgcccattgtttcgaaaacgtggaaagtaataatttgtgccagtgcccaacatgcacctgaaattaaacagaaaataaaagttttcgtttcaggaattggtgtcccacggaaaatggcaacgacaattgctagaattaatgtcccaatagttgtccccaggatttgactcgctggtttaccaccaattttaccaacaataactgggaaaatcccccagccaatcatcggcattaagccgattaagatatttacagcgttcattataatttcctccaagcctatttaatcaattagtaaaacgttttactaactatcttgatgattattataaatgacccatttcgataattcaaccctttttgaaaacgatttacatcctaaacataaaaaaagattaatcaggcaccgtttccgcccaattaatcttttttaaatttattttttcttagcttgtgaataaccgcgttttgacttataacctgcttctaaaatcatcagcatatcatcataatgtcgttgttgcgtctcttcagccttagcgccgtaaacatagcgcgcccattcccgttggtacccaggtgttaaggcgtcgaaaaaagttttcacggttggccgtgtctcaagtcgcgcacttaatcttggaatatcaacttcaaattcagataatggtttttgcgccatcttcaatcactccattattttaaccgcatcacatctctggcaatcattaattcttcgttcgtcggtacaattaaaactttgaccttagaatcatcagcactaataatccgttcttgactgcggacattatttttctcttcatccaattttacaccaaaacaagcaagctgtttacaaatatctgctcgtaattcgctcccgttttcaccactaccagccgtgaaaactaacgtatcaataccgttcattaaagcaacgtatgaacccacgtacttaacaacacgattgacaaaaatcgataatgccaacgctgattgtggccgtgtagcagccgtttcttccaaatcacgcatatctggtgaaagttctgaaatgcctaataaacctgatttgtgatttaaaatatcaatcatttcgggcatcgtaatttctaatttcttcgctaagaaagcgactagagaaacatcgatatcaccagaacgtgtccccatggtaatcccggcaagtggtgtaaagcccattgaagtatcaacggcatggccatcttggaccgcagtgattgaagccccgcttcctaaatgaagcgtgatcattttttgtgattctagcggtgtttctaagatttcagcggcacgatgggcaacgtaacggtgacttgtcccatgagcaccgtattttcttgcgccatatttttgataatattcttgtggaatactgtataaataattttcaggtgccaaggtactgtaaaaagaggtgtcaaaaaccgctacttgtggtacacctggcaataaggttgtaaagattttgatgtaataggcctgtgttggattatgcaatggtgcatattctgccaaacgattaatttcatccaatgccactggattaatgaccattgagtcactgaaagcttcaccgcccccaacaactcgatggccaacacccgtaacttcatccaaatgactgacaattcctaattccttcaagcgagtgagtaggagtgttgctgccatttcatgagtggtcacatcttggacttctttaaatttttgattgtcaccatatttagcggtaaacactgaatcagataaccctaagcgatcaatcatccctttggcgataactgtttcactgggcatttcaaataattgccattttaatgttgaactgcccgcgttaattgctagaattttttccatgttatcgtctcccaatctataagtaattccttcatgccacaattgtaagcaatttcataagaagttacaagcattgatttaataacacataaaaagggaccacccaccaaaaatgaatttagcggctgatccctatcgtttttattattttgcgagtttgtcgtctgattggatattttgaaccttttccaagaatgaacgccccattttgttatcttggtagttacttggttcaataacatctaaatagaattgatcaataaattgaattaaaccatcgattttttcacgacccatttgtgtttcgatttcttgatacttttgtacataacggctcactaaacgatctaaaacatcttgaccttgtttggttaaacttaagaatttaacccgttgatctgattgtaagtgttcttcaacaacgtagccgttttctttaagtaaacgacattgacgtgagattgcagaacgactaacactcattgttttagctaatttgctacccgttaaatcgtcattagtggcgatttcgtacatgatcaagaattgatcaaatgacactttgtagttcaaactttccccactgacaaaatcgctaagattgctgataacccaacgatagataagcgatagatgggtgataacttcccagtcttcagaatacttccccgtaatctttgatgacataattgaatctcctttttataaatacaagtgatgagggtcgaaaataattaatggttttaatttgattgctaacaaccatagtagcatattctttcaaaaaagaaaccacctgttttcattaatttagtacaaagtcacttaatgattaacaattatattgtaacgttaattattgcaaggataactatctgcaacttttttattaaaatttctattattttggcgttattgtaaaaaaagagcaaactactaactatcgttagtagttcactcctttcaaacctattatagattgcgatccatattgaatgtcaatttagataaattaattcctgacatgacgagttcgccaatcatgcccatggccttatctttcatcgtgttaacaatcaaataattttgttctgtcaaatattttgttagtgcttcgccttgataattcttagcttcttcttcaatactatccaacattgtccgtaattcttgtttacagcttgttagatagtcaacgttaccttgaatatgttggctatagtgaccttcaaccaagactgaaattgtccggtacatccaataagcactattaatatcccatttcattggtgtttcactgaagctaggatctgtatcattggcatttgtaaagaagggaataaatggtgtgtaagttggcatccctaaagtaatccacataatcgcagcttgttctttaggcacatcgttgcgcaattgtaagatatgcgcattttgtgttctgtttaagccaattggacggtaacgatacttgtcagcatcagcgccgtgacccattggatcgaattctgtttcgttataatgtgaaccaagtaacatttcaatgtcttcaacactaatcttatgttcaatcttgcgaatgaaaggtagatcagctgattcaggtgacatgtcaaattctgaatcaaataagtgatgtgcgtaccagacacgaggtgtattgtagtggcgatctttttcgttcattgtgccgaagatatgacggaagttccagcccgtcttatctggatttaagtgatgtttttcaacatattcttgaatcccttcagcccacatgaagttatccttatcgctgaaatcaacttgttgaatcgccacttggtttgccgctacggcatacccatcatctggaattcgttgtgctaaccaaagatgaccagtaacaatttccatataccaaacttcatcatgatcactaaacaagacactgttgcccgcaggtgaaccgtattgtttgatcaagttaccgaggtagctgaccccttcacgtgctgagttaatgtagggtgcgaccattgcttgcatacaatcttcgtctaagccgtctttaaccaatggatcgtaggctaatgacttttcgttgccatacgtactttcagtacaactcatcgcaacgttaacttcattaatactactttcgtcataataacctttgttcttgtaatccacattgggcaccgctggccagcgataaccgtcttctggtaaagtcgcttcaaaaccgttcaaccaagatttaattttttcacccttacggcctttaactgccggattcatatagaaacgttggggggttaagggcataaaagtatcatcattgcgggcaatcattgtcgagccgtcaagtgatgcttttttaccaactaaaattgttgtacaagctgattccatgtctatcgctccttttgatttagagaacattaaattattctcataaagatactattagtgtacgcccgccttggtcgaatgtatacccatattcataagattctctaaaacaatcatcaactcacttaaaaattagagtttcttcattaatttatgtttgagcaatcttttcatgatatattatagattaagtatcctaacaataaggtggtttcaaaatgaaaaaattaacacacgttctgttgatgctcatggctagttgtttcgtgattctagccggttgtcagaataaaacgacggtccctgccgccgcaactaagactgaggatcaaatcgagcagtatgttcaaaaggtcaaccaactttacgctgatgccgatcataaaaagcccgcaaaattaaccgctaacaagaaaaacgagattatcgaatcagcccaaaaattagatcataaaatttcagataatctctatatgagtgccctatccagtaaatcaaaaaccgcttttaaagcggctcaaaaagatttaaaacgaattgatactggcgctcccgtcgaaaaaactaagaaaaaaactaaaaagaccaaagatagcgatttcttcgatgccgatgggattgtcaaagatggcttgcaacttggtgcagaatcagattatgccaatgatgccaaaaaattagccgcctataaagaggctaaggcccaacaagcagcaatgaccgctgttgataacctctttaccaacagcgaccacacggcaattcccgccactttaacaactgaagatttcacctactctaaagcgcttgttgaaaaaacaactcacaagaaatttaaagaacgctacttaaaactgatcaaggaagctaaggcccagtttgatagttatagcgctagtgcctcatcaacggctactagccaaagtagctcagcaactgacacaacaactactgatcaaacaacgcaatcaacaagttattcaaacactacgccgcaaagtacctcatcaagtagtaataccggcaataacaatggtaatgtgactacaaataataacacttccgatactcaatcagagtcatcgacaagcgataaccagatttcaacccaatcacaatctgatgctttgttacaataatttaatctagctgtaacataaatagaggctattgaaatatttcaatagcctctattttttagtaaaatacgaacattatttataaaagatcgttattaaacgctacctttttaacataatctgccaattagtcttttaaatcctgacatcttaagaaacttgtaacaccgtgctaactattatgtaacatgtttgtcacgttagaatgatatgcttattgggtacgataaattaaaacaaacttaaacgtctaaaaacaaacttcaaaggagcacttcaatcacaatgaaaaaacaaaaaatgacttatttatcatctggtatcgttggtttagctggtcttgcattaatgggtatccaagctaatgaagctcaagctgctactacagggacagttaactacgcagacggtgctacaactatttggacaagtcctgaagttggtcaaaaacctacacgttacttaacaaacaaccaaaacgttacaatcaaaaatacaaaacaagtttacggtcaaacatggtatcaattagctgataacgaatgggttgccggcgaattcgtcaaaacaggtgcaacaacaccagcagctacaactgctgctcctgctgctaaagacacgatcacagttaactacaagtctggtgcaacaacaatctggacaaacacaactgctgctcaaccaactggcgcttacttaacttatggtaaggcacaaaacgtcattgcttctaaaacagctaacggcgttacatggtatcaattagaaaacaaaggttgggtaccttctagctacgttgttttaaacaaccctagtttagccggcgtcacaccgattactgatgccccagctgttacaccagttgcaacaacaactgctacaacacctgctgctacaactgcaacttctgaatcagctgctcaaacatcaacaacccaaccagcacctgctgcttcacaatcatcaacaacacctactgcacctgctcaacaacaatcatcagttgcaacttcaacatcaacaagccaagcaactcaagttcaaacacaaacacaaacgcaaacatcacaaactagcacttcagtagcacctgttgcacaatcagcttcaacacaacaaagtgcacctgctcaacaacaatcatcaactcaaacacaaactcaaaacacaataaacacagcttcaagttctaatacaacagcaacaacacctacccaaacaccaaaagctcctgctcaaacaagcggtaatgctcaaacagttatcaatgcagcattgtcacaaattggtacaccttatgtatggggcggctcaacacctggtgttggtcttgactgttctggtttagtacaatatgcatactcacgtgctggcgttaaacttgatcgtgttacaactgctcaagaaggtgctggtcaacgcgtatcacttaacagcttacaacctggcgatattattttctggggtggcgctggtgcatcataccatgatgctatctacatcggtggtggccaatacgttcacgcaccacaacctggcgaatcagttaagattggtacaatctcaagttacttcatgccttcattcgcagtacgcgtattctaattacaatcgaatcgtaaataaaaaaccgctaattaattttagcggtttttttgatgcactcagattgacttataaattgactacctttcccatactttcatccacatctacaaaataacggttagaattacgactatcataataaacaattacttttttatctgacagaaacgatattggattccatcttaataaaccactcttaaaaataagattttcgccagtcatattttgatacgtacaaaccagatacctggcgggctgattgttgattctaacctgtgaaggtgcataatcaatgacctcggccataactttttcgcctgattgcttcaacatgcctattaatttcgcccggtgtctacttcgaccaattataatcagcgcggttattagaaatagaccacccaaacctcccatgatacctaaaaaaagtaaccgcattttagtcacattttcaatggtatatggttgctcaacaccattgattgttatatggaattgcgcctctcctattggaatcagttgtatcagcattcctatggttactaaaatcacccccgctgttaacgctaaataacctaaccatttaaaattataaaaaatctgcttttgcttatgtctgaacatactactgtcctccattactaatatctgactttattatacctaatgatccaacggttaccttcacatatcaaacaaaaaataccatttattttatcggatttatgccaaattaaaagaccatccgaaagccacttttacaagtcggtttcagatggtcttttaaaattattttgataattcattataattattttgctgatttacgttccttcaagaagttcaatacagctgttgtttcagcattacgttttttagcattcttttggttgataggacgacggttaccagaaacactaacatgtaagttttgtgacatttcgcatttcctcctttcatgcatatattctattattctaatctgaattcacttttttttcaagtaatgtttaagcctttggtaactttctaaaatggttcaataaccaactggtgataggaacggttgctatcacgccaattaccccgattagcaacgttaatatctcaccaattaaaattttatgatttaatattttagcgagcggataacctaattgaatgaaccaaatcgtcaatgataggaagcttccgaagaaactaaagaacagtgtattgaaggctgtcgcaataattttctcaccaatcgcgattcccgctttaaacaaaggtgccggtgccatctgttcatcatattccaaaatttcaaccaacccactagcaaccgcaatgctggtttctgcgattgcgcctaaactggctaaaaccgtcatgatcatgccaacttgcggaaatgataacccgattgccagaccaaagccttcaatctcttcagcatcctccgcgccaaagccataggttgctgcccagtggctaatcggcacaatgataactaacaatgccagcactactaataacgacgtcacaaacgctgtcttagccgttaaaggttgcttcgtattcatgaagatcgatgtcgccaacaagatcagactcaatagcccactgaccactaagggattaaagccaccagcaattaagaccagcgctaaaatgataacgacgaagttcaacccaaggctgaaaaagatggttaagccttgccaaccacacactagtattaatagtagtaataaaacacccgttaataacatcataagcggcgcacctccactaactggcttgccaacaagcttgtcaccggcacggccaaggtaatgccgattgcgctaatcacggtttgtgtgaagcccaaggtcatcgtgcgcgatagtgtataggcaattgtattcccgtttctcagatacaataaaataatcggaaaagcttctgccataacaatgaagaacaagacgttaacgagtggcccaataatttctcgaccaatcgctaaccccgagttaaagagttgtcgtctcgtcacattgggctgttcaaaggccaactgttgcagtgacgatgaaatatcggttgcttcatccatcacagcgcctaagatccctagcacgacttccgccaagaaaaccgtcttgtagggttggagctcataatccattgtttcgtaatggagtccttggtcgccactgatttttagcaggataacgctcaacagtaacgccaagaacgtagccccaattgtcgcaccaaatgataccaacatttgccgattcggtccgagtaccaacaataacgtcagaccagttaaaactacggcgagtccacacatcagcggcaataaccaacgaccaccagttgcagcgttaaagtggagcgtgataatgaagaacgcaaggtttacgacaacacttaagatggtcatcaggccgcgcttaggcatcatcacaagcaataagctaaaggtccccaagatcacagctactagcactgtatcgcgcttaggttcgtttaagagccattgatggcggtcttgatcatggtgtaagaaaacttgctggccccgataataacgataactatcggccagagatttggaataggtattttggagctgaatcgtctgccctttgcgcttcgtattcaagaaccgccccgttactttttgttggatctcggtatcttgattctggtaatcatccgttgttttcgttttttggatcgttttgacagccgtcacttggatcaacggttgtttgtagcgcgtcgcatcgtggtatgttgctaaaaccccaatcatgcagatcaacaaaccacctagcgccagccataagcgtttatgtttcacagttgtcacctcaaattatattgtagcggtttgcctgttaatcaccaaacgtttatcgcaaatttaatcaatcatttaaccgactgtgttttaacccgtaactgaagtaaatgattaagcccaaaatgaaccagatccccgctgccatccaagtaactgccggtaattcgaataacatgaataaacaaagtaagcctgataatagtggtaaccaaggatatagcggtactttgaaaccgtctttattcggaatatcctttcttttacgcaatggaatcaccccaatagacatgaagaaaaaggcaattaacgtcccaatattgaccagattcgtcaattgatctaatgaaacgagcccccctagtgtcgcgataatgactgtcaccacccggacactgttgattggtgtttggtggcgtgtttcaattttaccgagcatcttaggtaacaaaccatcccgaccgattgaataaactaaccgcgaactactgtaagtcatcgtcaacatcattgtgaacatcccagccaaagcaccgagtgataataagcccgcaaaccagttttgatgcacgacttgtaaggcaaaggcgactggattagccacgtttaattcacgatatgacaccatcccggtcaaaacaaaagcaactaaaatatataataacgtacaaattactaaggtcccgataatcccaattggtaaattcttttgtggattttttacttcggccgctgaagcagagacacaatcaaagcctaaataagcgaagaatactaatgacgcacctttgaagaccccactaacaccaaacggcatgaatggttgccaattagacgactttacataaaaaatgccgacgactaagaatagtagcacaacgccgattttaatcatcaccatcaaattattgatgcgtgtcgatgaacgcgtcccagacattaataacactgaaatgagcgtcacaattaagactgcaaataaattgatataagtgccatgcgcgggatcaaatgagcctgtaatcgccttaggaatatgcacgccgaagccttcaatgaaggacacgaagtatgcagaccaaccggttgaaacggccgcgactgataacatgtattccaagaataatgcccaacctaacaaccaaccaatcagttctccaaaaataatattgccgtaagaatacgcactccccgcgactggcaacgctgatgaaaattcagcgtaacacattgcggccactgcacagaccactgccgcaatcataaatgacaacgtaatggccgggccactgtgtaacgcggcaatcgtgcctggtaaaataaaaatcccagtcccaataacagcccccacgcctaacgcaattaaatccttcgccgttagtgttttagctaaacgttgatcttgttgaagataacgctcaagtgactcttttctgaataatcttgtccctaaacccatctgcaaaacgccctctcgatgctttatttggtgatgctaaacgtgttctgtaacccatattcttccggttaaccctgagaatataaccagggttacggcacactctggttttaaacgtgctttttgaaactgacttctgcgcttagcgtcactcgtcgaataactgcttacagcagttattcgacgagctgtgctaatgctcaaaatcaacccgtttcaaacgcactctttttcttgtcgtgttctataatccggatatatcgcactttttttctaataacaaaaaaaggagcccactagtcttcactagtgagctccaccaggaagatgactcgggttacccagtcatcttccagtttattaaggtttatcatgtaatagacaatctcttcccttaatcaaccagtcgaattctgggtttcttaaagaaaaagttaaaggcaactcgttgcattgtcatcatgataaaacctccttgttattattaatttctaagtatagccaagcccatcgaaattgtaaagccttttttaagcagttgttttttcaaaaggaatctgctagaatttaaaacaacttattcaaaggatgtgactggcattgaaaattgcaggctaaatttctgacaactcgattggtactaaatggccccacgtttggggaccgtttatttctgattgtcgttagagctagcttgcgtttattttcaaggccggtaaaaaaaccagacttgttaacagacgcccatagtagcgtctttttttgtgcatacaaaacgacaaccaaccaatctcatttaaatttatgaggtgatattaatgggcacaatccaattcaaacaattaacattcaactatccagatcaagcaactccccttttcaaagacgtcacacttcaattcgatgccagctggcgcttaggcctaattggtcgcaacggccggggcaaaacgacgctgttaaaactacttcaacgccaattagaatttgacggacaactgaaaacagatctagattttcactatttcccacaaaccgtagccgatcccagtcaattggcccgcgacgttctaatgacgctcggtcaattagatgacagcaccttttggcagattgaacgagaactcaatttactcaaagttgatctcgactgtctctggcaaccattcaatacgctgagtcctggcgaacaaaccaaggcgctcttggcgttattattcatcgacgagcaccattttcaactcatcgatgaaccaaccaatcatctcgatcaagatggtcgcgataccgtggcacactatttacaacaaaaaacaggtttcatcgtcatcagccatgaccggcactttttaaaccaagttatcgatcacgttttatcaatcaaccgggcggatattaccgtccaacaaggcgattatcaaacctggcagaccactcaggaacaacaaacccaatccgaacagcatcaaaacagcctgctcaaaagtgaaatcaagcggttgaatcaaacggcccaacaaaaatctcagtggtcccaacaggctgaacgtggtaaaaatgcgggtagtgtcaaaaatgaaagtgccaatctcgataagggcttcattggacaccgcgccgctaaggtaatgaagcgcgccacaacgattactgctcgtagtgaacaagcggctactgaaaaacaaggtctgctcaaaaacgttgaaattaccgcaccactgacgattaacaatcagtctttaaagccgcaacaaatcgtcctaaccgcaaccgacctagtacttgaacaagatggtcgcgccctaaatcagccgctatcatttgaactaaaggccggccaacaagtcgcattaaccggcgctaacggtacgggaaaatcaacctttatcaaagccttactcgcacttcctgaaatgcagcatcaagtcagtgggcagttgaccattgcatcgcgaatcaaggtttcttaatttaccacaagattttgcgcagctcagtggctctctagctgactttgcagccgccaagcaggtatcactagaacaattactctcaactttacggaaactgggttttgagcgggaacaattcaaccaccggcttgaaacgatgagtatggggcaaaaacgtaaggccgccctcgctcgttcgctttgtgaagaagcccaattttatgtctgggacgaaccgttaaactacctagatgtcattacgcgcaaacaactccaaacattaattgtccaaacccgcccaacactcttgttcatcgaacatgaccgcgattttatcgacggtgtcgctagccaacgttatcaattgattccacgctaattaactaatacgtattatctgaataataagtcgtatttaagccatcagtattaaacgtcttattagtattgtctttaaagaacgccgtgtttaattgattcaattcagtctctgtgttacttaacgttttggtttgtaacccgagactctcacgaagtttgttagacgttgcttgcaatttatcggtcgcaatcacttgataagaactcccgttaatccaggcttctttcccgatgatttgaccactcgtaatgtcggtcccacattgatggtaattttcgattaacgtttttgtttgatcagccgttaaatcagtactgatgtgcttgcctaattttgtcattaaacctgataaatggaccaagtattggggcttttgaatcttatcagcgaccccgcgcaagacttcttgttggcgcaactgacgaccataatcaccacggggatcttggtatctcatccgtgtataaactagggcctgcttgccatttaaatggtggcggccctttttgattgtctgcccatcgaaactcacatcgatatttgttttaacatcaacgccatcgacgaaatcaaccagttctttgagcgcgcccatatcaatcgtgaccgaataatcgattggcacaccgataaattcactgacggtttttttagccatcttcgcttgccctagttcataggccgcgttaattttttgaacattcttagtcttgctgccaaccatttcggcgagcgaatcccgcggaattgaataaaccaaggttttcttagttttaggatttaacgtaaccaccatcatcgaatccgacagaccgcgatcgacacgcccatcagaccccgtatcagcccctaataataaaaatgagataggtttatcctgattaatccgattggaaacctgtttgttttgggttttaatcgcacgaattgcttggttttcttttattttgtaaaaacccccaccaattactaaaataaccccgataacccctagtacaatctttaacttcttcaaaataacgactcctatctgtttactaatctcctattcgagtatattaaaaatcgctaaagatggtcgctttattaagccaacttaatactttttaggtttttttattattttagaatccaaaaaagttcccacctgattaaggatgggaacttttttgtttgtttaaacgtgcttttaacactaacttcttgcgcttaacgacgattgccaaacaatcgattccatcggttattcgtcactctatgttaatgctcagaagctgaccaagtgttacagcactctttttttaaacgtgcttttcaaagctgacgcttgcgcttagcaccgtattgcaaacaaccagccatgctggttattcacaacactcagctaatgctcagcatcaaaccgctttgaacgcactctttttttaacatgcttttataagacatggccctgcgtttagcgacaattggtgaacaatcgctttcagcgctcattcaccaatctatgctaatcctcagaccattatcgtcttataacacactcttttttaatctaatttcttttccaattcgctgacaatttctgcgtgttttgcttctgttaatttaatttttgccatgaagatcaaagcagaaacaattaataaagccattggtacgaagaacatgtatgtcttgaattgtaataaaccaccatttgtaatatcgcttggtttagcgttacctgtcatgcctgcgtgaattgcggcaatcccaacaacaccgttggcaaaggcaccagctaatttatccaataatgggcgaacggctaacgtaacagattcgttacgtgtcccactcttcaattgaccgtattcaacactatcagtaattgtcattaaagctgctaagaaaacaagtgggtatgggaagaagaataacccaacagcgattaagacaacaactaagttgctaccagcaaataagaagagaatgtagccaagcatcatcatggcaatcccgccaagatagatggcacgacggtgaatcaatgatactaacgttgggaataaggcaactgagataacccctaagatagcggtaatcacaccaactgttgagaaggctgcagcgcgacccatgacgtatttgaagtagtaaattaaaagtgagtttgtgataacgtaactaaaagcaaacaagaaatatgatagtgataaccacattaattgatcatttttaccgattactttgaagacatcgcggaaacgaatcttttcagtattttcacggatggcactcttttcttctttagtaccgataattgttgctaaagcacctaagaatgagacaaccccgatgacaacggcgaaccctaaccaaccagcgctagtttgttcgctaccatgtgtccctgaaaacatttgtgagaagaagactacgattggcacaataacgatgattaccccttgggcacctaacgttgaaccaaaacgagcaatggccccaaacttcgtccgtttttctgaatcaacggttaaagcaggtaacattgaccaaaacgcaatatctttaaatgaatagaagatatccaagataacgaaaacgattgcaaaaagaactaagtataaataagggctgtttgttgctaagccaccgaagttcgtgaagatcatgattaaaccaacagaactaatcaatgaaccaattagtaaccaaggtttaaatttcccccaacgagtccgggtattatcaactaccccaccgataagtggatcaaaggcaatttcaataatccggatgacaaccatcatggaagtgacataaccgatcatttttgcattaaaagcggcattttttgtatcgaataattggctagtaacaaaaatcataaaataagtgctaagtgttgcgtagaaagcatcgtgaccaaatgccccgaatgcatatgaactatattgtttgatatcttttagttttttcattgttcaattcctttcatttgatttaaaactagtgataacgatgttcaataatcttttctaaaatggcttggcgttgcttttccttggctgtgccaaactggttttcttctaatgaattaaaatcgtttgctaataaaacggattcaagatataacgtcaattgacgtttaatataaaccttgttgtcttcgtttgtttgcttcggatttccggcgataatggctgctgcaaattgatctgcatcgatggttaatttattatcattcattctaatagcctctttctaaaatagatttttagccggaaaccgtttaagcgtgatctctaatcgcggtgtaaacgcattcttcagctaacaaattcattttactaaacttttactaaaatgtaaacggttaattaaaattccattagtttgtttaaatttagtaacttgccaaacagcaacataaaaaagccgttcaccaatcactgatgaacgacttttttgaatcttttgaatttagcgcttctgcatcacttggtaaaccgctccgataataccggcttcattttttaaatcggccgccacgactgtcggtaatgcaaggtctttaatactattatgaatactttgcacgttttgaatttcagcattgagttgcgtcataaacgtttcgttggcactaatgccaccgccaataatcaccttttcaggatcgaaagcaaccatcaaattaataattcccttcgccaggctgtggtagtaactcgttaacacgttttgtgcgaggacttcatgttgcgccgcccgttcaaaaataatccgagcatcagtcagctgatcagcactgaattggttataacgccgcaataagccaatgacagtggcacctctaaagttcaaggaacccatttcaacatcaatctcgtcatcttcaatgagcatccacccaaattcacctgagcgcgcatgcgccccacgatagatttggttattgatgactaacgcgccaccaacaccggtgcccagtaccaaacttaggtagttggtaacacctttagcggcacccaaccattgttccgcaattgcagctgcattcgcatcattttcaacagccacgggtagattcaatttttcagtcagtagacctttcaaatcaacaccggttaagcatttaacagcgcccgctgtcgttagaaaaccgtctgcttgcaccacgccgggcacactaaccccgacacctgcaatcggcgttgtttgttgaaaaccctgaaccatctgcactaatttagcaactaacgtcgtttgatcttggggtgtttcaaatgcttctttacgcacaatttggccttcttgattgactaacccaactttaatcgttgtgccgccaatatcaatcccaacaaaattcgtcattctgaccccacctttaattaatttccgcaccattcgtcgcaatcatatcgcggtaccagtagaacgaatccttgcgataacgattgccagtgccttgtccgtaatcgtcaacatcaacatagataaagccgtaccgtttagacatttggcccgtgctggcagctactaaatcaatacagccccaaggcgtataacccaataattgaacaccatcttccaagacagcctttttcatctgtaaaatatggtcgtgtaggtaattaatccgataatcatcatgaatctgattatctgctgtcttttcatcgattgcgcctaagccattttctacaataaataatggtagatgatagcggtctgtaaaccagttcagtgcgtagcgtaagccgattggatcgacttgccagccccattcactcgcctcaacatacggattagcaacccgatcttggtcttcgtggtattcaagtttgccagtatcttgaaccgcaaaggacatgtagtaactaaagccaatataatccactttcccggccttcaaaatggccatgtcttctgttgtcatatccaagttaaattgtttgcggtcaaaatggtttaataaccactgtggataaaagccgttcgcatgcacatcggagaaccaaaggcgtgtttgcatcgctctttgtgcaaataaaatatctgccggtttagatgtcagcggataaattgggcacatcgcaatcatgctaccaatttcgaaattcgggttgatttgatggccaatttgaaccgctttggcactcgctaccaattcataatgagccgcttggtacatccctttttccttatcttcgcctggtttaaataataaaccagaatccgtgtaggctgagccaccatcttcgtaattcgtttggttattgatttcattaaacgtcatccagtatttaaccttatgctgataccgtttgaaacaaaccgtcgcaaaattggtaaagaaatcaattaactttctatcgcgccagccaccatattgttgtactaaatgatatggcatttcaaaatgggatagcgtgaccactggttggatgtcgtatttcaaacattcgtcaaaaagatcatcgtaaaattgtaaccccgcttcattgggttccgcttcatccccatttggaaaaatccgcgtccacgcaattgatgttcggaaacatttaaaacccatttcagcaaataatttaacatcttccttgtaccgatgataaaaatcgatgccgttgtggttaggatagtattcaccgtcaaccacaccgtcggttatttttcgaggcacaccgtgacttcccagtgtcattacatcagcaatactgagacccttgcccccagcttgataggcaccttctaattgatgggccgcaactgcgccaccccacataaaatcttgcggaaattcttgcttgtccatgtcaattctcctttaaccaattacttttgcgcattgttcaaagcaactttgttggctgcaatgacgaatggtaaataagttaatactgaaatgcctaaacataagaacccgataattaacgctaaccagttcccaccagtccctaagaatggcatcaatggcccaggtgtggtccacgttaatccaaaggcaggcgttggaatccaattaaagataacggtcactgtgtaaccaaccaaaatattaatcacaggtgttaaaacaaatggaatcgccaaaataggattcaaaacaattggtaaaccgaagatcaatggttcattaatattgaacaaaccaggcactagggctaattttgcaatttcacggtaatctttacgccgtgatgcaataaagatggcgatgattaaaccaagtgtcatcccactaccacccatattggcgaagacgtcattcaaaataccccaagtttcgcggtaaggaacgccccaggcagtcccgtgactattaatgaatgtttggttagctaaatcagcttccgtaaacataattgaccgtaaagcattcaatgtattagggccgtgaatcccgactaaccaaagtacattttgaacaacggcgataatcataatcccgaagatgttaaccccaacgtgccgtaatggggtttgaatcgttttatagataatttcgttgatgccttgtggtgcgattaatgaaatgaagaagttagccatcgcaaaaatcataatcatgataacaattggaattaaaccgttgaaagaacgggctactgcaggtggtaccatttcaggcatcttaattctcaattttttgatattgaatagtttaggtaagaattcaccgacgatcatcccacaaatcattgcgacgaataagccttgtgcgcctaaatacgtcgttggtagatatgaaacaccgtctttgacaactgctggtgtgtataaaatcatgaaggccgcaatcccggtcatcccgattaacatatcatctgatttgaagtgtttcgctaaatttcgagccactaagtatgcgataaaaatagagagaatattcatagtcccattggtaactgatgtgaataattgctgtgctttttccagatttggaaagaattttggtaagaataaaatctgagcgataaaaccactcttagaaaaaattaagttatttattaaaataacgagcgatgctgccatcgtaatcggaaatgtatacataaaggcatcacgaaccgccgcgacatgtcgctgttcatttaatttagtcgcaaacgggacaatggtgcgttccataaaactattaaacttatccatgtaaaaacctcctaatgtaatctataatattttcaataacttaattatagtaaaacggttacattaaataaatatgtttagccgatattgctacacataccggctagttgttatctataccattcgtggtacaccctgttccatttaattgtttaacgcaacttgttgtcgtaattcgcgcaaaatggcttcaataatatagacacacggcacctgactggtcatgtcataatattggtgaatccgcgattcttcaatattataagtcagtgcataccgtcccatccgcgctaaaggactctctaaattacccgtaatcgtcaccagtgttgtatctggatcattgacaaaattgttgagcatttcaattaattccggtgttttcccggaaacagacaacgtgataatcacattattggtcgtattttttagttgtgaagacagtggataatagggatctttgactgcactactgttaaaacacagtgccgataattgccgtgatgcatactccgcaatcgccccagatgcacccatccccactaaaaaaatattgtcagcctccaataaaatcccaccaacaatcttaatcagtcgaagcaagtcatcggaaaaagcctccatcgttaccaatggaagctcatcgcttggttgttcacctgtttttaattcactctttaaagacaccttaaactccggaaaactatcgtaaccaattttccgaataaaccgcatgactgacgaattcgacacgcaggcacccgcagccagttctctaactcgcatatacgggaccttctcatcatgactaacaatataccggtaaattgctaaatctacatctgataacttatccatatccttatagccaaaaaaagccatgcgctctccccatttcattactattgataactttattctactatattatcgtagccggaaaaggggattaggaaaagtttgttataaattgaacgaattcctaattatttaaagttttaaaagcgtcataaaccggtccgcccaaataccttcatagaaggcgattgtttgtgtcgctgtcataaatgaattatcgactgtcgtcgaaagtcctgaaaccatttgtaattgatagcccagactgtgggccaccttgactgttgtatcaacgcaatattcagtttgcgcaccacaaatttctagtgaatgtatttgcttttgttctaataaagcctgcagattggtttgccagaatgaattagcatgtgtcttttgcacaaattgcgcatcagctggtacgtctaattccggcactagttgccaatccagttgcggtgctactaatacttcatcattgtgttgaacaaaaattattggccgcttattcgctttataaatttcaattctagtatttacctgttcaattaattgctcaaagttagcaataggttgttcgcctttgcagaccccattttgcaaatcaatcactaataaacaatctgctaaatcaaccattcataatccctcctaaaagttattacttttttaggagtataacactaaccgattcctatttcttctgactcaatttcaatgctggtccgattaatagtaatagaacaattacggaaaccaggaagcctgcgtgaaaaccagctaattgttgttgaactgttccatgattgcctaagccaatcgtggcgacaatcgtcgcaatcaatgcggaaccgaaactagaaccgacattttcgatgatattgatgccaacacctgcttcggctagctgtcgctcaggaatgccgagatacgcatcactcgtcaatggtaagttaatcccgccaacgctgatgcctcgtacaaataggattaatgcaatccaaaccatgcttgtttgatcagtcatcagcatcaagggaaccgagccgattaaggcgactgctaaacttagtaaaaccactcttttggcaccgaagcgatcaatccacttaccgattaaaggccgtgtcactaacatcccaattccttggggcatcattgctaaggcggcttgaattgccgtgaagtgccggaaactctggaaaaagagtggcaaaatcaacatcggtcccataatcgcaatattggctagaaaaagcccgctgctcgcaacagcaaattggccatgcttaaataaattaagtggtaaaacggtttgatgctgacaccgccaatcataaatcacgtaaataacggccatgaggacgccaatcccaacccagagcagcgtttcagcattattaaacgttgcataatcagcagccttagaaacgccataaatcaacgtcgcactcatgattgatagcattaaaatcccccagccatctaaacgactttgacgattaaaaggttcaaaattgggtaagctatgaatcattagtgggacggcaatcagcgtaatcccaacattaatcaagaataaccagtgccacgaagccacttgcaaaataaaaccacctaaaaccgggcctaagatcgggccaaaaatcatcggtgtgctgacaatcgccatcactcgccccaagttttcgggaccggccgtcttcacaagtaaggttgacatcagcggcgtaataatcccggcgctaaagccttgtagtaatctgaaaataataaaactcgttacattccaactaaaaccagctaaaacggaggtaatgccaaatgcaatcaccgcaccgataaaaatccgcttgccgttaaagtggttcattaaccatccagaaatggggacggcaatcgctagcgctaaaacgtaccccgtaatcgcccactgaatcacatttaaagtcgtcgcaaaagtctgtgttaattgttgaatcgcaattgtcatcattgttgaatctaacattggcgcaatcgcgcctagggcaatcgcccacgcagcggttaaaaccgcctttggtaatttagtcatctttgaatctgtcatttaaaaatcctcgaacttcataatattgtcgactaggaaacaataacgccattttgattccttttcaacaaaaaagcagacatgatcaaaataaattgacgatgtctgttttaatgatttgtcttttgattttcaatggcttgatcaatatgagcgctataagtctcaataaagttcaagagtgatgttaattgttcatcggtcgcctcttcaaaaaccacatgatcgcgttcttgaaattgttgatgcagctgatcatgctttgtaacgaccgcttggccttcaggtaaaacgcggaaataaacttcttttttattgtcggctttttgataagattcgatcacttcttttttcaaaagcttcttcgtcagcttgctagctgcaccacgcgtcatgtgcagtgcttcagcaattttggtcacattcggatccgtttgcttggcgattgcttccaagcaatgaatctcagaagacttatacccgctcaactgcgcttccataatgccttgttccaaccacgattttttataaaataacgccgtaaaagcttgaataatttctgcttctttatccatcatctttactccctcatttggtcatctatctagcagtatagcatctattgtttctgattcaacaatctaaaacaacaaaaaagccttccgtttagaaagacttttgaattggaatttactggccaatcatcccagcatggatcttatcgatattccacttcatcattgtgtaataggtatcgccctgttttcctttttgcgccaaggaatctgtaaagattttagcatagattggcagtcctgtttcttgggcaactttagccatagatttcggtgataccgatgtttctacaaacaaactctgaacgtccgttgctgcaattttggcaaggaccgatttcatttgggttggcatcccttgcgattccgtattgatttcccagatataagttggggtcacaccataagcttctccaaagtatttaaaggcgccttcagaagtcaccaatacgcgccgcttttctggaatatcagcaaattgcgtctgagccttcgtgtgtaatttttctaagcgcgcaatatactgatccgcattccgacggtaataatcagcattcttagggtccttagcttgcaaggcggctgtaatattttcaacatattgcatgccattggccaaatccaaccacgcatgtggatctggttcgtccttattggtcgttagatgttggaccttgatgcctttagtcgtcgcaaaaacgtcttccccaaacttcttatgtgcgattgacactaactttttaaaccaaccattgccacccgtttcaagattcaagccattatgaaacaaaacatccgcgtctgtcgcttttgaaatatcagttggttgaggctcgtattcatggggatcggtcccccgtttaacgatactgtacaactcaacccgctcttggccaacattggcgaccatatcttctaaaatcgaattagtcgtcacaacccgcaatttggtgtgttgattgttggcttgtgctttagattgtgcccgttggtgaataaagccgtacacgccaccaataatcccgccgacggttaataaagtaatgagtattttcttcatcgttattgtcctcccttagaggcacgccatttcaaaaagccttgcttaggtgcgcagataaacgaaatcgcgaacaaaacagcggccattaagacaattgccgggccagacgcccaattgaaggtataactgaaatacagcccactaattgccgcaactgcccctatcccagctgataaaaagagcatcgtcacgagtttattagtccataaaaaggccgtcgcagcaggtgtaattaacatcgcaactaccagaataatcccgaccgtttgtaacgccgaaactgtcactaacgttaaaaccagcatcaagccataatgtaagacctgcgttttgagcccgtaagttctggcgtaggtttcatcgaatgaggtaatcaataattccttatagaagaatgaaacaaataagataacgatgcctaatacaatcgcggtcgtcataatatcctgatcactcactgctaaaatattaccgaataaaatatgatggagattcgtcgcactttctgccatcgaaatcagaataaagcccaatgcgtaaaacgcactgaaaacgactccgattgacgtatccgtcttaattttactgtgggtcgcgacaaagccaatcaagaccgccgctaaaataccgaatacggatgcgccaactagcacattgatccccagcatataggcaacggccacgccaggtaacacggcatgcgaaatcgcatcgcccatcaaggacatccctcgcaatatgatgaaacttccgataatccccgacataatcccgaccataatggcggttaataatgcactttgtaaaaattcgtagcggcctaatgcgccaataaatgctgaaatactagtcattggtctacctcctgtttttcaaacaagacggcagataagtccgcactaaatgcgcgctcaatattctgggcgttataaacttgatcagtgggcccataatccacgataccgtgattcataaccactaaatcgtcaaaatactgtgacaccttattcaaatcatgatgaataacaataatcgtcttacctgcatcacgccactgtttcataatggccatgattgcagtctcactttgcaaatcaataccgacaaagggttcatctaaaataatgatctccgcttcctgcacaattgcgcgggccacgaaaacccgttgcaattggccgcccgacagctgaccaatttggcggcgttcaaaatcaccgagggctacctgttctagcgccgctcgactagcggcttttgcctgcttccctggatcacgaaacagacctaacttgccatacgtgcccgtcaatacaacatcaaaaacgttgattggaaaattcaaatctaggtccttgcgctgttcaacatatgcgacttgcttttggacagcccgcattgattttccttgatataaaactgagcctttccgtgctttaaccaaccctaaaattgctttaatcagcgttgattttcccgcaccgtttggtccaatgataccagtgattttgcctgcgtcaaagtgaacggcaacatcagtaaatactggtgtgtcatcgtaagcaacggtgaggttcttaattgataacataaagagcctccattcttttaggcgaacctaacttaacatctatcagcataactgattttaatataattaacaaatattttagcctaggctaaaaatattaagagtgggctaacacatgattaataattttttcacatgaattcactctaaatcccacactttcccctccaaaagcgctatactagtactaacaaatcgataaggagtgttttaataatgaaaaaaccaattaagggttcatgtacgacagtcttagtcggcaagaaagcttcaatcgacggttcaacaatgatttctagaaatgatgatggtcacgaagctctagatcctcaacgttttgttgtcgtcaatccagaagaccaaccacgcgattaccaagccgtaattagtggtgttcaaatcaaattacctgataacccaatgcgctatacatcaattcctaactcactactcacaaacggcatctggccagctgctgggattaacagcgaaaacgtcacaatgtcagcaaccgaaacaatcacaactaaccctcgtattcaaggattagacccacttgttcccggtggtatcggtgaagaagatatcgttactttagtattgccttacatccacagtgctaaagaaggggttgaacgtttaggcgcgcttctcgaagaattcggcacatacgaaccaaacggaattgccttttctgatcaagacagtgtttggtggcttgaaacaatcggtggtcatcactgggctgctgttcgcatccctgatgatgcttatgtggttgcacctaaccgcatgaacatcgatcactttgcctttggctcagacaacacactttgttcagctgatttaaaagcattaattgatgataataacttaaacccagactttgaaggttacaacctccgtcacattttcggtagtgcaaccatcaaagataccgtttataacaaccctcgtacttggtatggtcaacaatatttcaacccagaaatcaaacaagatcctatggaccatgatttaccattcatctgccatgccaaccgtaaaatttcaatcgaagacgttaagtttgtcttgagcgcccactttgaaaatacggaatacgatccttacggtagcgcaccagaagacgttaaaacacgcttccgtcctatcgggattaaccggaaccacaatgtgcacattttacaagttcgtaacaatgtccctgctgaaatcgctggtattcactggttagcttacggtgctaataccttcaatacagttgtgccattttacgccaacgttaatgacacacctgaatcatacaagaatgcgacaggaacattcgaccttaacaatatgtactggttgagctgtacaacagccttacttggcgatacagactatgacttctacgttgatatgcgcaataccttcgaattagaagcaatgagtgcttatcacgaaatccaaaacgcaactgacaaagcctttgacggtcaaaaagatgccgttgccttcttggaagaagccaataacaaactagcaacagaatcactccaacgccaaacaaaactattgggcgaaatggtgatttcaggatcagaacacatgaaattacgttataacttgaatgactaattggtcataaaaatgagcttcagacaaatactgtctgaagctcattttttttatttattacgactcacctttattaaattcgcccaccatatcagttacagtgtaatgaccttttttgacatttacttcaccgtttaagttttctgggaagacaaccataatactatcatctttaccttcacttgctaaaaacgttaaatcgatattagctaattgtgtatccgtggttactttttgattttccgttactaaaatatcaaatccttgtccctttaaggccactgtatcaatccccatatgcaataacacgtcaacaccattattaccttttagtgtaattgcatgttttgttgggaaaactgatgttataacaccttcaattggtgcatagatttgaccattatctggtttaacagcaaaaccatcacccatcattttgctggcaaacaccggatcactaacctcagtaattgcaatagcttctcctgtaactggtgcatgcaattctaatttagtatcattattaacctcagttgaaacatacacatcactatgttgactatgtttagcgtaacgccgaccccaaataatggttaaaattgcagcaattaaaaatgcggcagtaacagctactacttcataaatcatcttagattgtggtccattaaacattcctagcataaagatattaaggactggtgcaaatccataaagtttaacccctaataatccagtaattcccccgccgactgcggcaccaatacaccccgcaacaaacggatatttctttttaacgttaacgccatataatgctggttctgtaatcccaaatagagcagagattgaagcagagattgaaatttggcgttcatcggagttacgactcgtaaagattgagccgactactgcaccaaactgcccgaaaacagcagacataaacatggccataatcgtatcataccccaatacttgaacattaatttgtcccaagggaatgatcccccaatgaatcccaaaaataacgaagaattgtccaacaccagctaagatcgcacctgaaataacaggacttagattatatagccaagtataaacattagcaattccaacacctacatagttcgccaatggtccgattacaaggaatgttacaaacccagtaattaataatgctagtgttggtacaaaaacaagtttcgcaacttctggaattatttttttcaaccatttttcaataattgataagaagtaaacggcaaaaatcgttggcaataccgctccgccatacacttttagtggaattgctaatgagcctaacataacattagcaggtatatctgcagctgttagcggataaatcaacgctgcagctaaagcgacagctgtatatttattacttttaaatttctctgcaccagtaattgcgataaaaattggtagcattgtaaatacgcctgaagctaaagcatttaaaacagctaagactaatgatttttcaccaaataaatgcatcatttgtatcagaataacaagcccttttaaaaccccagcagcagctaagatattaatgtagggtgtaaaaattgccgaaatagtcgccaataaacggtctgatagttttttcttttcttcaggttcattggtattatcctctaaatttccaagttcaaccattactgcatcgtagacatcagttaccttaggtccaataacaacttgatattgaccaccggtactaagtgcagtcatcacaattggcatttgttctagcatatcttgttttactttagcagtatcttttaaaacgaatctcaatcgtgttacacagtgtgttaggcttttaatattttcttctccacccacaccttcaataatattttttgaaatttccttatatgattgtgtcatttcatacccctccattttcaggcataattaccaggttttgttttactttgcattgcaacaccaaagtcggtatagattctctgtgttaagtttcgccctaattcttcagcaatatggtgtgcaagcacttggaacggaataatcgtaaacaatggtgctttatattcatcaatttggttcaaatctaaagcaattgtgcgttcatctaccgtatcatttaaagtgattgtatataaattatccacgtattgcgtttcatattcttttaacctagttaatcgatcattgactggcgaattgctttcaataaagaacatctgatgattgcggttaacttctaaataggggccatgcataaatacttcaatatccattccttggctaggcactctgaccgtttcacagaatttggtttgcatttctagcactgttcccattactgaaccacatccaagtgcagtaaaacgagttgctttactaaactctgcttgccaacgttcaaagaatgtttccgttttattaataatattaggaatttcttcaattgcagttgcaaattgttttaattctaattgctcttgttctgaagtgatttggccacgttctctagccgttttcagccccatcagcatcaacttaaatgtcgtcatagagaaacctttagtcacatagcctactcgttcttctcccatttcaatatcaataaccctatcaacaacttgtgttatttcacttgtaaggttgctagttactgcgtatgttctaacagtaggacgttccaatttaatcttttttagcgcatcaatagtcgaagtactctcaccgctctgggaaatcccgataacgacatcaattgctgggcgtaatttttcataatagtgaaatttgaatggttcttctatttcaataatgacatctgttaaatgctcaatataatattttgcactataagcggcattaatgctggagcctgtcgctagtaataaccattctcgaccatcaattgttggtatattatttggataatgattaagcatatttttaaggtattctgcttcttctctaatgtaagtcatcattgttggtttttgatccataattaatttcctccatttttgtggtaacgtttccacaaacagagtatatatctatataagcattttggcaagcgttttcttaaattaattggtaacgttatcttaaacgctgctgacgaacctttcgtttaatggtaaactgaactaaataaaaaatatcgaggatcccaatgaataaaaacattacaattaaagacatcgctaaattagctagtgtttcagtaagcactgtttctcgagtcattaatcatgatcctagtgttgctgatgcaactcaaaaaaaagttagcaaagttatcaatgaataccactatcaacctagtatgattgcccgtggaatggtctcaaaaaaaacaaatatgattgccgttatcgtttctgatattactaatccatattttaatcagttcgttgctattttagaaaaacgactactacttgctggttacacactatctctatttgattcacaaactgcgctaacaactgataaggactctgtcttagccattgaaaccaaaattgtaaaccaaattcgtgaaaatcactttgacgcaaccattattttaggtggtctcattgatcgtctcaacatccctcaagactatctcaagactcttgagaatttaatcagcgaaatgccaacaatcatcgtcggacgtgctaatatcactgagttaccaaattctgaaaatctcacttatctaaatcgagaccagattattccaaccaaactcttagttaactatatgcttaagcagaagcatcatcagtttattttcatcggtggtaatgcatcagcatggatcacaaacgatcgaacaaatacttttaaagaggttcttctcgaaaataacgttcccatttccgatgattatatttttaataataatttctattttcaagacggctacaatgctgcaaaacacgttattcaatcgcaactctcctttgatgcagttgtcgctattaacgatcgtgttgctatgggctttttaagaggtattaaagatcttactaatcttgatttttcagaatttgcattaggaagctgtgaattcttcgaagaaaatgcgtttagcatcccaagaattacatcagttgaccataatattgaagccctcagtaactcagccgcacagttattgattgctactttagaaaagcaaagccttcaaacctcactaccagatattacgcctaagttgattttgggcgaatcttgctaaacaaaaataaatcagtattaaaaaaacgagttaaccctaataggttaactcgtttttattatcactatttttccatcatgattacttctaaaatcgattccccatgagtgaccgatttagcctgtaagttctccaacgttctcatttgtttaggttgtgtaaagaaattaatcacaatgtcatcataacctgcttcgtgaattagttgttgatcaaaactgagtagcaaatcccctgccgagatcttttggccgtcaacataatgagtgacaaatccctcacctcgcatattaacggtctccaaaccaacatggataatcatctccaggccattatccgagacaattcctaatgtatgccgcgtcgaaaaagtaaatttaatatgtccgtcaaatggtgcgtaaatatgtccatctgttggttgaattgcaaagcctttcccctcaaaaccgtttggaacatcatctaacgttaataactgtccatcaacaggcgctagaattttagtcgtaatgcccgtcaaaaccttatcattatcactaggtaagtggccttttgctaaacgattctctagctcagtcacaatttcagcatgtttcttttcagtaattttaaccttaaacataaatacaattaacgctaaaattgatgaaatcaatggtgtgtagaaggcgaatagctcaaaagtgtgaatattttttgccgtcatatcagcggccgttgcactcccagtcattcctgccataatcgctatcgttccaacaatcccatttgaaaatgcaccggtaatcttatccagcattggacgtacagccaagacaactgcttcattacgattaccattttttaattgaccatattcaatcgcatctgttaacgataaaacaattacgagctgtgcaaaagtgaaattaaagaggactaagccgacaattaataataccatatttgtactagcaaaaataaagataatatatgatagaatcatcgaaatttgtccaactaagaataacattttacgtggaataaatttatttaaaagtggatataatggcgctgttgagaagcccacaattgttgccactgcgccagctatccagaattcaccaggttgtccaatcacaaatttaaatagatagaataaaaccccatttgtaacaacgtaagcaagtgaatacagtagataagcacagctaatccaaagaatctggtcatttttggcaattcccacaaaaacatccttaattgttgttttttgactagccgcctgccgaataacgtcatttttttccgttgtgccaaacgcaactgctaacgctgaaaggactgcaattattgaaacaataattgcaaaggctaaccagccttgaggcccttgatcatgctttcctgttgccaggtaagtaaagtatgtcgtaatcggaacaacaatcatcgttaacccgttccaaccaatagagcctgtaaaactacccaatgctgtaaaaataccacgttctttactatctccactgatagcgggcaccatgccccaataggccacatcggcaaaggaatagaatacatctaaaataataaaaatgattacaaacgctattgcaaagaggagccaatttaccttagctaatccaaaaatccctgtaaaaataataacaagtaaaattgcactgacaacgctccctatcacttgccaaggtttaaactttccccaacgagtctctgtattatcaacaatattccccaggattggatcaacgacgacttctgccagtcggataatcacgactagtgtggtgattaaaccaatcaaccgattagccactttgggactaagatccgtaaacatcccactagtgacataaacaataaaatacgtacttaatgccccataaaaggcggaatgccccaaattccccaatgcaaatgcaattcgttcctttaactgtggccacgttaactttttcttagccgtttgctgtttttccatcttaatacctccctaatctattttttatttgattgcctctgaaaagactctggcctcataagcgcttagtttaataggcccgtttgtaattttatgatcaggcgtcaatacgtccaccaagtctctcattacttctaatgtgataggttcgtggctaaaattaatcataaaataataccgttcatgcttgtcttctctaacttgaatagaaacggtagggttcgtttcttttaatggtaattgggatttaagtcctaattcttgtgttattttggcatagaaatcatctaaaaaatcatcctctaggcgacaagcttgataataggcaattcctttaccaaagctgtttttcgtaagcgccggtgttcctttataaaaattattttcataagtgccaatagtctctgcatccactactgatacaacttcacaataatcctttgcttgataacttttatttccaattaatacatgatttgattgttgtggatagagtgtatcagtctcttgaattgtgattccataactttctttcaaggcttgtggccagcctccttggtgtgttaaaaaggactcatccacaatacttgttatataagttccgacaagctgtccaccttgcttcacatatgctgctaatttttcagcatagtcattactcattaaaaagtgcattggatcaatgaccaattgataatccgttaaatcctgttcagtcgagataatgtccacggcaatatcattttcccagaaatagcgataatgttcgctgattgtccgccaatatttcttcgtttcatccgcataattacgagcatcatctaacgcccacatattagcgtaatcaaaaacaattgctacttttgctgcttgatattttgtatttttagctgtttttaattgttctaaatcctgtcctactttcataacatcctggaaaactctaccttttgtttccacttgattactaatcacagcaccgtgaaacatttccgaagcccctaatgattggtgaagttgaaagtatagtattgaatctgcgccatgcgcaatttcctgtaaactagccatttcatgcatgcctggtcgttttgaacgattgtaaggatgccaatttacttgtgagggtgtactttccataattaaataatttgattgtttaagaccgcgcatcacatcattcatcaatgctgtcttcatggctaagtgcgccgtactttcgtagccattagcccaattaggataagaatcccaactgataacatcgacatgtttggcaaatttctgataatccaggtcatagaacacgtgtgattctggtggattgccacccatgaaattagtcgttactggcatttctggggttatctctcttagcggttgaatttcagactcataaaaatcaattgtttggtctgttataaatttacgccaatctaaatttagccctaatacaccagtatcaccatttggcattggcgcttgcacttgctgccaatctgtatacgtatgactccaaaatgtattccaataagcattatttagattatctaatgtttgatacttacgttttaaccattctctaaaggctgactgacacagttcgcaataacattgaccaccatattcatttgaaatatgccataaaataactaatccactatgaccatagcgttccgccaacttacgattaataatttggactttctcgcgataaatcggcgacgtataacaatgattatgtctttccccaaattgtaatcgttggccctgttcgttaaccctaagtacctcgggatatttctcggctaaccatctgggtctagcaccactgggcgttgctagaattatttttcctttttgatcagctacttgtttaaatatttgatccaaccaagaaaaatcaaactgcccttctttcggttctaacttagcccacgagaatatccctaatgagaatgtattaattttagcttgctcaaaagccttaaaatcatttttcacaacatctggctgagattgccattgttccggattataatccccaccgtgtaaaaaaacggttgtttttaagtcccttaccatatgatttttacctaccttttttgaaagtcatttttaatctatccctagcataatgattataaatatcatcagcaagcgttttcataaattaattactaaaacatagtaaacaaaaattaactcttgtttaccgtgtttataccgctacaaatcaataatatagtagtttatctttcgtaaaagtatgctatgatttagttatcgttaccgcttacataattatgtacacatcttactttacaggagttgattttcatgacgacaattcgcgaaattgctgctaaagctggttattcacctgctacggtctccagattattaaacgatgacccgacattttcaatttcagacactgcccgtaataaaatactagaaactgctcgcaatcttaactatcaacaaattagtaatattaagaagaacccttataacataggtgtcatttttgctatttctcctcaaaaagagctggaagacgtttattacagtaatcttcggcaaagtattgttcattacagtaatcaaactaatattattcttgatttttatttaaatgtcactgatatccccgataaaatagatggtttaattgccattggccaatttaactcagaggaattggacgttcttgcaaatcaatctagtaactgcctttttatagatgccaatccagatccccatcgcttcaacgcagttcaacctaatctagaaacaatcactgaacaggcaattgatttatttattaaaactaactttaaactgattggttttattggcggttccttttggcatgctaaccaagcactaacccaattaaaggatccccgtcagaagtactttgaaagttatacccgcgaactaggcatctatcatccagaagccatctatattggtgatgatttttccgttaaaactggctatgaactaggtaaaatgatagttgctaaccttgacagtcagcctctacctaacggtttcttgattgcatctgatttattgtcagttggtgttttacaagcttttaatgaaaataaaattaccgtaccgacagatacttcaattattagtatcaacgatatcgatctcgttaagtatgtttcaccacctctaacaacgtttagaattgatactgaccaactcgccaaagtagcaattgatacactcaaagaaaacattatttttcctactaaaatgcgaaaaacaattttaattgatgctgatttaatctatcgaaaaagcttcttaaaccattcctccttgctaaaataaaaaacacccattaattgggtgttttttcatgatattaaaatttaatctatctgactcaacgtttcgaaaatttttgcagttgcctgtatttcttctattggatcaataagtgttgtcaacttagatttatagaatttatctatcttcttaacgacctcttctccagttggcgtcaatgaaattataacgacgcgctgatcttcgttaacaccactgcgttctttagctaagtaatcactataataaagttgcgttaattttcgactaaccgctgctcttgagatatgcaggtcttcactcaatattgttggcctgacacctcccgctgcagcaattcgtttcatcaaaacaaactgttcaaatgaaatatgatatgcctcacagggttcattgagcgctcttcttgtattatctagcatttgaactgcttcgtaaaatgctaatgtattcttactcacgtatgttcacctcacattcatcttaacctattgttatatttagtcatgttaacctattctgctaaaaaaggattctggataaccagaatcctttttgtatacaaacgatattatgaagcttgaacacctgtatataatgtccatgttaaatgagctgtatagatatcattaccaacttttgaatcttttggcaatgttaagttgatgtctgaacgatcccaaccaaagacgttagcgccttggccttcagaatcagcagcattagcaacttcaacttcttgacctttaccgtctaatgataatgaaacgttcttagcaattgttgaaacatctttgtcatcaattgttggatcagcttggaaatcactatcttgcgcttcatttgtcaatgtgaagacgtctgctgtctgaccataagcagtgtttttgagcaataagttagcgttattgattgtttcaccattattagttgctgttaaaacatcatctgatttaacttttaattgccatgtaccactttgttttgttgttttagcatcatcgccggtatcgttattttcacgtgtgatttgcttatcaacaactgtcgcccaggctttgcccttaacatctgctaatttagcatcgtttgtatttaaaacagctgtcatatttgtatccgtgttcttgtatgacgcatgacgatcattgctatcgatacttacgttatgaccagtagcatcaaatgttgggtattgtgataagaattctgtatggttaccaaaatctaatacgtgcggtaccatttgtaaacgtaagtagccagtattcccattatcagagttatcaccaaatgagatcccaacttctgtattatcagacattggtaattctgtaccaccattagcgttggcatcgtgttctactgtggcagcgaatgttgctgttggtgcaagaatgcttaagattgtgccggctgttaaagctgcacttgtcaattttgtgaatttcatttgaaattcctccctaggtttaatttgtgctttgtgcacgttttttatataacacacctatggtgccgttataacaagtttggatgggtacatctgtcaaccattcagttggtttgacggaatttttatggctgataatccaaaactaacgatcagcgcagccagtactgccttacattgttagtgtggtatacgtattaaaattgatataactcacaattgcgaaggctagactcaccagaaataagatggtcgtcagtgtggttagtgcaatgaacgtatatttaacggttgaatagtgatacttatcgattaatttattaatcattctttgactccctacttccatgtttccgaatataataaattaagataactcctaacacgacacacacgctaatgacaatgatggttaattgtcgttttttctgataggccacattatgatcattaatgtagcgcgcatccgttttagtaatttgaacagttttcttaatttcccgttgatactgatcactcttgaaatcagcaatcatcgtgtaacgacctggtaccaaacgcttcccgcctaacaacaagttggcgttgaaactcgaattcggtgcgatatgcatttttttcaaatccagcttgtaattgaaaaagcctaacttctgattggttaacttggttgataattgaccctttttgagaaaaatcggatcgggattattcactttaaactgtaaggctgcttgtttatcaacaaatcccgtctgcatcgtaggcatttgtaaatgatgtaattctttgtgtggtaactttatcccatttaaagtaatgccaactgcatatacataacggttgttgatgctgccacctgtgggccccatggccgctaagttaatcgcgagcgcttttttccctttaaaagcagtggccggcattttaatccttactttcacccacttttgtgctttaggtgggaccaccacgctcggtttgaaacgtagatactgactccctgggtcggtcagtatctctcttgccaccggtttatccgataagtaatcaatccggccattatctgccgtttgtgcatctttggcactaatgttaaccgtaatcggcttatccgtgggattaaagaccttaatttttaaagtcttctcagcatttggttttaatttaagattgaagtagccgagcttattccccccaagattatcctttggtatttctggataaatcataaatgtcactttctgtttagcatcagcggttgctgccgtcactagttgcggtgttgcctgtcgcattaatccccaaaaagcgagcattatactgatgattaagtaccgctttttcatgagcgtctcaatactttaatcaaaccggttattgacactagcattaagaccccactggcagttgccacataagcccacttattctttggctttttaagcgcttgtgcattaacggttttgacatcatcggccttaatcgtgaaactctttttgaagcgccaagtcaatggcaacttgttccagagattctgaccatggacaaccgtatcaatcgtgtatttccctggtttcaactgttcgtaatcccacgaaatcggtagggttaacactgagttaggggctacagattgattgctagtcgtataaacatgtttggaagaaaagagcccttctttagaaacaactgccttggcgctaaccttattaataaccattggttgcgtattacggatcttaatccccattgcagcatgacgccgataaatcatggcttctgttttgtcatatttcaattcagggtaaactttgtagtgttggcctttcagtgcaacgcccactgaataggcatagttactaccaactgatgattggccaccttttttatgaagatattcgataaaatgccaatccccataaatcatgccgtttgttcgatcttccggcattttgaccgtcattttaagaattttagtctcttgagctgccaatttaatggtctcgctctttttatctaatttagcaattttagtgaacggtactttcaagcttggatctaaccctttagtgttagcttgaaaactaacgccaccaccaacttgggtcatcgaatttctcaagtcggaatgaaccgtaatcgcgtgatccgtaaaattctgaatccgcatttcaatttttttagtttgaccttgcgccaaactcatgttgaagtaatttaaacttaaatcctcttgttcatccggcaagataggctgcacttcaaagtccgctttttgggtttgagcagcagcttggacctgtgtcatttgacagagcatcaagcccacaaacgccaagctcaatgccattaaacgtctaacaaatttcaatcgtacgcacctcgttttattattctgcgattactaatgaccaagttaattggcttgtatattgtcttgggaatcgttttgttgctttaggcactttcaaaccaatgctgtaatcagcctgttgggcatccccaaattgataagcccaaatcccaaagccatgtgcggcataataaccaggatcaggtgtcttattggtgtgcgtcattaaattaactgccgcgccttttggtgttaactcaaactcagaagttaccttagaaactggggcggttgcccctacgtcatcactttcttttaagacaatctgcccattatggaaatttaagacggcattatctaagaatttttgatctccagcaatcttttcattagcattggtatggaactgatcatcttgtttaacatttaaagtccaacccttagaggtgtagtaatcctcaacgctgacggcgtatggctgtttttgattgtctttagttttagcttttagataatagtttcggtcagtgccagtcgtatcatgtttaccaaaatcccagcgtttatcggcaataatgccaatgtgggattcttcatatcgataagtaatgacttgttcatctttggcgtaagtgacagtataatcatgagccaatgtccaatcaggtttcgtggttgagccccaatctggatctaccatattagaagaatcaaccacggtccaattgccgtctgtttctggaataactttgggttgcactagtctagtgttcccaattttgccatcaaaggtctcatcttcggccaacttgtggctttcatcttttcggtcccgatagcgaacaacaatccggcctttagactgtttaatatttaatttggctttttcagaagccccagctccaaaatcggtgtccagactaacactattattaatcactgatttattagtctcttttactttggctttgacataagcaatcgccataccttgacccgcaatcggaataccatgatccaagataacctggttatcagtccaatcagttgtttgcttcgcaataattttttcatctttgtccaaataatcaattctaacttgttgaatatcacctaagtcagcatcaaaaacatcctttaatattgcacccggtttaatatcgcctgaggcagtgttaacaatttgtatccgatattcaatctcatcgtcaacttcagccgttgtttctgtcatataatctgcgtcggacttcgttatatttttaacttccttaattagggttggtggtgtttttttgataacattgactttagcgacatttgatttaacatcagcaaccatagctatattattaataacggtctttttagtgtctttgagaatagtctcaaaagttaacaccacacttccatccgctgggatagcttttaaaattaattgattaccagtaaaggttaagtcttcgcttctcacctcactcccgtttgaatctttataactaacatgaacagcgcttggttcatctagatcagaatcgagcggatcttcaataatggcctccggtacttcctcagaattagtgttagtgaaaactaatttataaccaatttcatcgccaatacttgcttctgtttcagtagcatacttcgcatctaatctagaaatattttttacttttttcgttaattctggtaattgtactttgataaacggtacatcgactatcgcacttgctgaacgttcttgttgattaacattactgtctataccaacaacattgacagtgttacgaacagttcgcccagaagctgtagttaaagccttcgcttcaaatgtgacactaacccactggttatctttaacactgttaggaaccgtaactttcaactctcgagttacttcattgtaagctgacggtgaaatggttatttcttgaccgctttgatttattaaccttattgaatttgtattaatttgaaattcggacggaataatatcactaaacgaaacatcactccaagaagaatccaatcccgaattatgagcacgtaatgtaaactttatattatcgcctggtctattactcccatcagtactagtttcattttgatattctttataagcttctggtgcaacgtcaggggctttagtaatccctatatcttgacgataatgttgtgattcaccaggggccaaggtagcaaacggccacttggctgtatatgaagtatcggaattttttaaaactgtgtaaccctcttctaaattcttttgttccaagcccgttccagaaaaattacgtggtgtgaacccatcaaaccaaggatttctcctagtccaagtttgtgccgcataattaattggtccatcaggaaccttcatattgatggccaatttatagggattttgagtgatatataatcctgcgttattgcccattgatgacatcggtactttatcattaccgtttaacattgtatcttgaccaataaaggtcccataagaaacggattgagttgtgtcatttttcaaataaagctcttgttgaaccgcagtagtacctgatagtgaaggccgcaatagaatttcagcaattaatgtcttcccattacgttcaaactgccccattattttgctaacaaggttaccctcgctgtcgtgcccgacaaaatatgccttatttgttaacttgttagctaagatagcttgtttaggtccatcattactttcatttggttcgaaaacaatcccaaaaccggttgatgttcttactgctttactactagtgtcttctcccttaaaaaaagcgccgattgttttattgttatctttaataaagatattaatctggctaccctgaatattgtagctagaaatttttgaatctgcttctgcgtcaattccgccattcacaccaccgaaggtataattaagaaatcgacttgtacttccttgaaaagccttacttccgacctctgtttttgtcttttgaacccaattaggaataccgtcatcaaaagtattgggattaattgctaatgcttttgatgttgggttatcaatcactttaacagtagctgtcttcgaaattaaatgatcagtttcggtagaagccgtaatatcgaccttcccaactgttgtcgcttttactagtagcgtaaaatctttctttatcggttcgttgctggaaatctttaaaatgttcttccctgtattctgattattttgtgattcaaagttaatacccccgttatcgctagatatttttatcggcgttagtattgctttattgccaagattaatatagagaggctcattgatttcactagcattaagatcaacttttaactggatggtatctccaacgatatattctgtttgatttagattaaaggttatttgaggtgtatcctccttcgacaaactagtttgtcgttgaacaccatctgttccaacgatatctttcagcaatagtggtttaggttcatagtgaacgccattcattattgttgtcactttcaactgttgtttagcgaatatactagatcattttggagagttgtccgagcggccgaaggagcatgattggaaatcatgtaaatgggtatgacctgtttcgagggttcgaatccctcactctccgttatataatgatagtatggcccgttggtcaagtggttaagacaccgccctttcacggcggtatcatgggttcaaatcccgtacgggtcatttttggaggtttagctcagttgggagagcgtctgccttacaagcagagggtcacaggttcgagccctgtaacctccatttttattttaaggtcgcatggtctagctggttaggacgcctgcctgtcacgcaggagatcacgggttcgagtcccgttgtgaccgtcaaaaagacggttaaaagcatcagtcgttataaacgaccgatgctttttttgtgcgtttaaaaagataaatcaggctataaaaaaacagccagtctaggctgcttttaaggacttatagaaataaaccagtaataaaaatgagataataaagctcatgtaaataagtattatttttaatgaaacccagttgcgttgctagcaacaatagttgagcaataataaaaggcaataattgccagcctacgatgattttagtcgcaatgatcaaaagaacggtgattaaccagaggcagtcaccaacaacggtgagcatcttattagttggaatcagttcaaaaaggaaaattaaccctaagaagagaccaatcttgacgagcaaggcttcaggtaagaaatgaatgccattgaaaatcaaagttgccaggaaaaagtaaggcgctaataaaaactgacaaactaatcgcaaccaatgattgttaaactgttttggaaagataaacggcacaagtaccaataaactggtaatcgctagtaaagtaccggcccaaatgagtgaatgacgaccaacaattagactaatgatcaacgcaattagcaggccgctagcggctaatgaacgctttagcttactagttgttgaaagaactagcggaatggttaataatgcccctaaaagtgcggttagcatgaagtataaatcaagatgcttgggaaaagggtgaatcgctaatcccacaattaagcccaggtttaagtagttaaatacgattaaccgagcaggcggattattagcaggtagttttttttgtctaagatagaacatagcaacacctttttcatataatatgactttcatcttaactttttttgaaaagaaggtcaatggcttttgaaatatgtcgtgatttatgctaaggtagtagagttataagaagttcccgataggattcacacaccgtgaagaggccttgtaaccgacacatatatagggggaaacatagaaatgcaagaaagacatttatttacttcggaatccgtttctgaaggccatccagataagattgcggatcaaattagtgatgccatcttagatgcgatgttagaacaagatccacaagcccgtgttgcttgtgagacaactgttacaactggattagtattagtcgtaggtgaaatttcaacaacggcttacgttgatatccaaaaggttgtcagagaaacaatcaagaagattggttatcgtgatggccaatacggttttgatggcgacaattgtgccgtgattgtagcacttgatgaacaatcaccagatattgcacaaggtgtcgatgattcacttgaatcacgtgagaaggatgaagatccgctcgataagattggtgcaggggatcaggggttaatgtttggctttgctgtcgatcaaacacctgaattaatgccattaccaatcgctttatcacatcgcttgatgcgtaaggtcgctgaactacgtaagagtggtcagttaacttatctacgaccagacgcaaaagcacaagtcactgttgaatatgatgaaaacgaacaaccaaaacgtgttgataccgtcgtcattagtacacaacacgatgaggatgttactttagaaaccattcaaaaggacatgctagaacaagttattaaaactgtcattcctgctgaatatttggatgataagacaaaatacttcattaatccaactggtcgcttcgtcattggtgggccacaaggggattccggtttaactggtcggaagattattgtggatacttatggtggttatgcccgtcatggtggcggtgcattctctggtaaggacgcaactaaggttgatcgttctgctagttatgcagcccgttatattgctaagaatattgttgccgctggtttagcacgtaaatgtgaagtgcaactagcctacgcaattggtgtggcacaaccggtatccgtttcagtaaatacttttgaaactggtacagtgagtgaagaagcaattcaaactgcaattcgtgagaactttgacttacgacctgctgggattattaaaatgctagatttacaaagacctatttatgagcagacagctgcttatgggcactttgggcgtacagatgttgacctttcttgggaacgattagataaagttgatgctttaaaagcaagtatcgcaaagctaaatcactaagaagtcaatcgagtaaaagaggcggcctttccttaacttatttaagctaagaaaggtctctttttatgcctagaattaagaggagaatggtgtaatggagaagagaaagacaaatgtattattagtaacgatcgcgttgtttgtcgcgacgtttatgactgcaattgaagggacaatcgtttcaacggcgatgccaacaatcattagcaacttacacggtatgcgcttgatgaattgggtgttctcaatttatttattaacaaacgcgatgatgacgcccatctatgggaagatggccgatcggattggccggaaaccaatttttatttttgggttagtgttattcgtgattggctcatccttatgtgggttatcaaatcatatggaaacattaatcatttcccgggcaatacaaggcttaggggctggtgcaattatgccagtatctttcaccatcattgctgatatctatccgattgaaaaacgggcaaaagtccttggttttaacggttctgcatgggggattgcctcaattattgcgccacttttaggtggctttatcgttgataagttaacgtggcattggattttcttcatcaatgtcccaatcgggttaattaccattggcttaatttggtatttcctacaagaagaaaaacgaacgagcgatcaaccaatcgactactggggtagcttctggctgatgatggcacttttaggcctcttatacggcttccaattaatgggtgaaacacacttgtcatggggcttattagtaccagcactcgtgattgccgtcgttgctttcatcttattcgtacgcgttgaaaagaaagcacaagaccctattatctcattatcattatttaaaaaccggaccttcgtggttcaaaatgcggtcgccgctttagtcagtggtttcttgattggctttgaagtttacatgccaatgtggatgcaaggtattctgggcttgaaagcttcaatggggggcttcgtggtgacacctagttcaatcatgtggatcttcgcttcattgtgggcaggccagttattagtgaaacatgcaccacaacggattttaatgggaagtttggcaattctacttggtggcagtattgtcttagcactcgtgccacaaacaacgccattttggttcttcttaatggtcgccgcttgtttagggattggctttggaatgatcattacaacgaccaccgttacgtcacagagtgttgcgggttcggataaagtgggggtcgcaacttcatttaatacgctgagccgaacattggggcaaacattgatggtgtcagtttacgggattattttaaaccgtcaattggccaaagggattagtggtgattcacgcttgaatcaaaatatgcttaatgaattaattaatccggaaacggctgctaaattaccacaaaacttattaccagatttacggcatattctatataatggtttgcattatatctactttgcttcaatcgtcttaattttagtcgcaatgtggattaatttatcagatcgtcgtcagaaacaataaaaaaagattggccagttggccaatctttttttattatctgaatagcacacaaacgccttctggggtctctaatcctttttgacaaggggttaataaaccagtttgagcgtctcggtgatagagcgtaccattatcgctattttgattaacggcaaagagaaattgatcgttagcggagaggttgaagtcacgagggaattcaccatccgttgacatttgttgaatcgttgtgagttgttgaccatctgcgctaatacggtagaccacgatagaattatagccgcgatttgaggcgtataggaattggccgtcttgtgaaatacggattgccgcaccaccattagcttcgtgccaatcatctggcaacattgaataagtttcaacggctgtaaattcaccagtattggcatcatagttgagaacagtgacttcacttgaaagttcgcctaaaagataagcgacttggtgattaggatgaaaaacgaggtgtcgagttccaaaaccaggttcactatggtaagttgctgttttagttaagtcgccattgtcagtaattgtataagttgttagttcatcggtgcccaaatcacagacagctaaccgattatctggtgtgaggtcggtataatgaacgtgggcgcttgcttgttctggacgaggaccatgaccagtgtgttggaccgtgttggctaatacgaggtggccatcattttgaatggcataaaccagaatttcgcctttatggtaattagcagcgtagaccaattgacgtgtctcatcaacagccacgtatgctggtggtgcaccagcagctaagacggcgtttaaataaaccggtgttgtgccagaaatatcataagcagcaatgccaccttgctcgccttctttaaccacggtatataaaatttgttgtttggaaatagccaaatatgaggcgttatctaaagtgatataaggtttaatatcagtgattgttgcggtttcaggtgagagcgtaccacgataaatgcccttaccaattcgacgggtataacccccaattaaaacttcttcagtcataaaatagactcccttcatcaaatactatttgagtatagcatattcatgcgaaaacggtttaattaatcacccaaaaggcgtttgaaaacgttaagtttaagtagaatatgctacaatgagagtatcttaaatacgaggagattcagtgatgataatgcaagcagagatcgtggcaatcggggcccaagcaattgatgccgccgaaccactggttattttatttaacgaacaagcaacaccagcgattaaggcagtcgccctcattcaacgttttacgacggctaatcaatctgaacgacttacgatgacaacccagtcaatcgttgtgattgatggacaacactatcaagtcacttatgttggggcacttgttaatgaaaatctcaataatattgggcatgttgcgttgatctttgattcagcaccagaagaagatcaacttcaaagtggcctttacttaacacctaaagatgctagtttacaaggcaaacccgattttaaagtggggacgctaatccagtatcaagaaactatgtaggaaataggtgggcacgtggctgatcgtaaacaaacgaaggaacaatcttggttttttaagtggtttttaaataagaaattaccagtaattttgttaaatgtttttctagttttgctgattattttattggcaactaaattagcgtggttattggagccgattcagcaattgatgttgattgttggcttaccgattattatcgcggcggttctttattatctgattaatccgctaattgattggttagagcatcgttggcatcttaaccgagtactatcaattaccttaatttttattgtgattgtggcgttattggcctggggtgtcgcaacgattatccccattatccaatcgcaaacaacgagtttaattaaacaatggccatcgtattgggcgaatattcaaaagcagacgatgagttggtttaatgatcccagttttaagtcgttgcaaaagcaattggacgatattaataccgatatgttaagcaacttatcagggaaagtgaataagatgttaacatcgactgtgactcatatcgggacagccgtcggggttgtgacaaatattgtaatcgcaattgtgacgatgccatttattctctttttcatgttaaaagacggtcatcgtttaaaaggctaccttgttaaattcttccccgttagaattcgggaaaccaccagtcaggtcttggaagaaattaatggtcaagtcagtcaatatattcggggccagttaacggttgccttttgggtagcagtgatgtttacgattggttattggattgttgggatgaaatatggattgacgttagggattttagcagggctgttaaacttgattccatacttggggtcattcctagcgttggtgccatcggtcgttattgcggcttttatctcaccaattctgctaatcaaagtcttgttggtttttgccgttgagcaaaccttagaagggcgggtagtctcgccgttagtccttggcagcaagatgtcgatgtatccagtcacgacgattatcgtcttattggcctccggtaagctattcggattagttggcgtcattgtcggtattccggtttatgcgattattaaaatcctggtgacacacttatttgaatggtttaaaaaggtatcaggcttatacgaataaagaagtatgctaatggtaattaaaaaggcgtggacaaattaatttttgtccacgccttttttaaacatgctttttgaaactggcttctacgcttagcgtcactcgccaactcgttccaaacacactttctttttaatgattgattgttagtttcatatagtgatgcgggatgttagcttccatttcaccttcactaatcacttcaaagcctagtttttcatagaaaccaatggcatgatcttgtgcaaataagatgatgtagggcgtttttgtgcgcttggcatcttcgataattgcctcaattaatttaaaaccaaggccctgacctctaaatgacttaattgtggcgacgcgttgaattctaaaaccgccatcttttagtacatggacacgtgcggttacggctgggtcttgctcaatgtaaccgacgtagtgaatagtatgatcttcatgtgcatctatttcttgtgtttccggcatattttgttctcgaacaaacaccgttcttctaatgtaagttgcatcacgaaagataacactgttatcaccaagtgtatgtttaatatccatttgtttcacacccttttctgctcaatgtcgacgctgtgaaagcgacaaaggtcattatacatttgtttaggggctgattcaatagatagggggaaagtttttaggtacctaactaaaaaagaatcaccccaaaaaagggtgattcattattttaataattggtctacaacatatcgccattaaaaatagaatgacggacaagaacgtaatccacttttcgtagtgctgataagcgcttgccaccagcataagaaattgaagattgtagatcctgacgcattttggtaagggtgtcactaattgaccccttgtaaggcactaaaattcgtttgccctcaacattttggtgggtacctttttggaattcagaagctgaaccaaaatattccttaaattgttggccatcttcttcgactagttcgccaggagattcagtatgaccggcaaaaagggaaccaatcatgaccatgttggccccaaaccgaattgatttagcgatatcaccgttagtacggataccaccatcagcaatgatcggtttggttgctgccttggcgcaccagcgaagggcaccaagttgccaaccaccagtcccaaaaccagttttgattttagtgatgcagactttaccagggccaataccgactttagttgcatcagcaccggcgcgttctaagtcccgaaccgcttccggtgtgccgacgttgccggcgattacgaaacttttaggtaaaacttttttgatatgttgaatcatatcaatcacgacttgtgagtgaccgtgagcgatatcgattgtaatgtattctgggatgaggttatcttgtgcgagttgattgatgaagtcaaattcatcgtccttaacgccaacactaattgaagcgaataggttgcgttcgtgcatcatcttgatgaatgccgggcgtttttcaggttggaaacgatgcatgacataaaagtagtgattttcggcaagccaaatggccagcggttcatcaataatggtttgcatattagcagggaccacgggaattttaaaagtctctgaaccaaagcgaacagtggtatcaatttcacttcgacttttgacgatacatttattgggaataagttgaacatcttcgtaatcaaatacgtccatgaataattctccttaaatacgaacatttatttttatgtacgacgattaattcgtacataacgtattctaacgagttgatatcggaaagtcaattaaaaaacaccgaacaatccagataatggtttgctcggtgttttgaaaataatttagaaataacgtttccgccagaagcgaaaccctaggagccccgcaatggttaaggaaatcgcaatggtgacaatccaactaattttaaaattggctaaaggtaaggcaacgttcatcccgtagaaactaaagactaagccggggatggttagcatgatcgaataagatgctagaaacttcatgacgttattcatgttattattaataattgatgaatacgtatcagctgtttcattgataattgaattggaaatctcggccatttcgatcgcttgttgattttcaatttgaatatcgtctaagaggtcaatctcagattcgttgagcattaacatgttagagcgcatcaaactcgctagtaccatcttatcggtttttaacgacatcatgaaataaactaacccgcgttgaatccccattaaatcgtaaagctcttcattacgtagcgacttttgcaaacggttttcaatacgttcacgggaacggttgatatctcgcagatattgcagataaatggtcgaaatgcgatagagaatttggaggacgctgcgccgttgttcctgtggattaaagtttttgatttgattatcaataaagctctgtaagaaatcaactggcgttttattgatggttaagatgacagaatctgttacaataatccctagaggactcgttttgtagcggaatttatcagcttgctgatcatctttttcaagaatcggcatgttaaaaatgattaatgtcgcgttataatctggatcgtgttcggcacgcgcactttcgtcggcatctaaactataatagatgaaatcggaagggacgtgcagttttttagtcagtaaatcaatttcttcttgcgtgggatcggtaatgttaatccaactattgggttggattttagcatgcttggttaacttctttttagcttcatcgaagcgataagtatctagcatgagttcacttccttcgtcggtaacttgatatgactaagtttacttgatatttttagaatgtaaaggattgaaataaggagaatttgaattgaaaaaaattgatttagcgcaacaattcctacaagccaatttaagcgccttgcaatgtccaatttgccaaggggcgtttgccactattagtgatcaccaattggtttgtgaagcgggccatagttttgacttggctaaaaatgggacattgtacttcttacccaaacaaatgaagtctgaatatacaaaagaaatgttaagccatcgccgggcattcttacaggccggcttctttaaaccgttcttagatgaaattgctaagcaacttacggccaatagtcggattcttgatgttggttgtggcgaaggaacgccggtttaccaacttgcccaacaggtaccagcccaatatatcggctttgatatttctaaaccggcaattcaactggccagtgattacaatcaagaaggttggttttgtgtcgctgatttagcgcggatgccgtttgctgatcagagtttggacacagtcttgaacatcttttcgccatcgcaataccaagaatttaaacgggtgctcaaaccggacggtcaactcattaaagtcattcctaatgccggttatttgcacgagctacgagaattattatatcagggtcaggaaaaggaaagctacgatcatggtccagtattggacttattcgaacaacattttcccggctaccaagaaattcaggttcaacaaaagatgaccttaacacccgaaacactagcggatttagtcgagatgacacctttaacttggacagcaacagaggcgcaattacaagcgattacgttggcggcattaccagagatatcattggatgtcacggttttggtgggaaaacaatgagaaattaaagtaattttaagaaatctgattgcaagtcagaaataagggcgttataataaccacaaggaattttttccctaacttttatcagaatactttttgataaaagctagtgatgaaatgacactaacgtagtttctcgccgtgaataaccgagggactacgtttttttatatggaaagcaccagtagagctttaccattaaatcgtgtataattaagctactgaatctttattgaaggaagttagattgtgactaatcatattgttttatacgaaccacttattccagctaatactggcaacatcgcccggacatgtgccgggacggatactgttttagatttaatcgaaccattaggctttgaaactgacgacaaacatttaaaacgggctggtctagattattgggaccaagtgaagattaattaccacaagaacttggatgcctttttagaaacggttccggatcgtaaacacctctatttgatcacgaagtttgccaagcaagcttattctgatcaggatgtgacggatacaagtgttgatcattactttatgtttggtaaggaaacaactggcctcccagaaacgtttatgcgtgaaaatgaagatcagtgtctccgcattccaatgtcagatcacattcgggctttgaatttatccaactgtgcagcattggtcatttttgaagcattacggcaacaagattttccagggttagaaaagagtcatctgtacgatcacgataaattaaaataggagtgtttctaatgcaaactaaaaaagatcccattagcgttgatgcttttcattttgaccgtgtgtcaccggacgccgaaccacaacaaaatatccaagtgagcttagtgaaaattgatgctgacgacgaatatttacaagaagctgatttaaaagccggtaacatctatcaaatcgttacaccattccaagtgatgccacaaggaagcggctttgccgtatctggtcaaatttcacgggttgttcaattgttagatttctttggcacaccagatgaaatcggacaaaaggaaatgatgaaattatcacgaccattaatcgaatacattgaaaccttgacgtatcaagtaacagcggttgctttgaacgaagggattcaacttcaatttacagcgcatgaaacaccagaagaagcataatgattaaataagagaagctaaggggaacttcggttgacctgggcttctttttttgtttgaataaagcctaaaagatgggttaacctgaacagaagttcgtgtataataaggattagatatgtaaggtaaggagattttatggcaactcaaacgaaaaagcgtaagaaaaaaacgacgactaagaagaaaaaaatgcaacagcctgattacacgattaattttgtcggctttttgtttattttaattagtcttttctccgggctgaaattaggatttatcggcgcactatttgcgaatgttttccgcttattcgttggtgacacattcgtcctgggcgcaattctatttgcaatgctcggtatttacctcttaatttatggcaaacaaccaccattgtggcaacaaaaaacggtgggttttagtttagcctacattggtattttaatttggctatcagctttcatcttgcaccaacaagcgattaataaccattttgtcgcagctacttggcgcttattgtttgaagatttccaaaaaatggcagttacgacggaggtcggcggtggcctagttggtgccgtgatttatagcggttcgcattttttgtttgcacagatggggacctatatcattgccgtgttagtgacagtcatggggctgtttatttttatggatattcccttcagcgtggttgttaaaagcagtcagcgctttgtccacggcttatttcaagtcggacgctatactaaatcaggcttggtgaaggccactgaaaagggccgcgatcaagtcagcgcgctcaaagaacaaacgcaaaatgcgttgtctgcggttgacgaaaaaacgacgccaaccaagacggttaaaaagcctacctcagaaccgaccggcgagcctgagaaaacgggggttgtggtgaatgaaccagccacctttaagattaatggaccgaaggatttaccaaaaccaattgcaacgcaccaagcaactaacgaggcagaagcaactgcggaaacaccgacagaacaagtgccggatgttgccgaattaacgcatgctgtagaaattgatgcggattatgaaatgccaacgcctgaattgttgacgcagattccaccatcagatcagagtgcggaatacgaagcgattgaaaaaaatcaacaggtcttgaaacaaacctttgattcgtttggcgtggatgtcacggttaagagtgcaagtttaggaccagccgttacgaagtatgaaatccaaccggctgttggtgttaaggtgtcgaagattgttaatttggccgatgatttagcgttagcactggccgccaaagacattcggattgaagcaccgattccaggcaaaccatacgtcgggattgaagtccctaatacaactgtctcaacagtttccttcagagagatgatcgaacaagagccaccacatccaggcaaaccgttggcagtgccattagggaaagatatttccggtaaagtgattatgtcggatttagcgaagatgccgcatcttttgattgccggttcaacgggtagtgggaagtcagtagcgattaacgggatcatcaccagtattttgatgagcgcgcaaccccatgaagttaagttgatgttgattgatccgaaaatggttgaattaaatgtctataacggaattccgcatctcttgattccggtggtgaccaacgctaagaaagcggccaacgcgttgaataaagtcgttaaagaaatggaacgacgctatcaactttttgcggatactggtcagcggaatatgaccgaatataaccagtatattcaaggccataatgaagatggcgaaatcaagggcgtggcgttaccatacattgtcgtgatcgttgatgaattatctgatttgatgatggttgctagtaacgaagttgaaagtgccattatccggttagcacaaatggcccgggcagccgggattcacatgattgttgccacacaacggccatctgtcgatgttattactggtttaatcaaggccaatattccatcacggatcgcgtttgcggtttctagtgggattgactcacggaccatcttagatggtagtggggctgaaaagctcctgggtcgtggggacatgttgtacctaccaatcgggatgagtaaaccactccgagttcaaggcgcctttatctccagtcaagatgttgaaagcatcgtttcctttatcaaagctcaaaagacggctgaatacgatgaagagatgattccaacggcggctgatgaacaccaagaaacggcagatccagaagatgaatattatcaagaagcggttgaattagtggttaagcaacaaaccgcgagtgtttcgatggttcaacgtcgttttagagtcggttataatcgggcagcccggctgatcgatgaaatggaaagtcgcgggattatcgggccttctgaaggtagtaaaccccgcaaggtccttttgcaagaggttccaagcgaacaaccaccaactgaataatgaacaaaaaacggtattagaatcagtagcaggattctaataccgttttttcaaagaaaaaccagagttgttaaaacggtggcgcttttgagtttaacccacttttttggtatgatagtgtctgttacattattcttaaaaagacttaagttgaaagcaagccattttaactgttaaaacagtgaggagcagcaagtatgaatcaaaaagtaatggatggcgtttatttaaatatcttacaaacacaacaattcaaaacaattcgcttttctgtgcaattagtggcaccagcgactaaagaaaccctgacaaaacggtcattactagccagtgtcttatctgctagtagtcaagcttatcgtgatcaggttgcaattgccaatcaactccaagcaatgtatggggctggcttcaatatgaatgcatatcggcaaggacaattagcgatttttagtatttcaatgcggattgtcagccctcaatatttacgcgatacaatcgacttacaacaacaagcaattgcctttattggcgaactacttttaaaaccagatgtcattgatcaagcctttaacgcggttacttttgatcgggaaaaagaaaacttgcaacgctatatcgatagcgttgccgatgacaaacaaacttatgctgcactcaaactacgtgaactctactttacagatcaaacgcaacaaacgcctaattatggggatgctgacgttttaaagacgattacagccactgatttatacacttattatcaacagatgattgcaaatgaccgaattcaaatgacggttgtggggaatgtggatgaagaaaaattggcgcttgatttggcgcaattatcactagcaccacggggcgaaatgctacctgggattttttatcaacaagctgctagcaatgcggtccgtgaattgacggaagaacaagcggttcaacaaggtaagttaaacatggcttatcaattgccagcttacttctatcaaaaggattattacgcggccttagtgatgaacgcgttatttggtgggacaccactatcgttactcttcacgaatgtccgtgaaaaggcgagtttggcctattacgcttctagcaatatcgatgctttccggggggctgtcatggttcaaaccggaattgaaagccatcaaaaagaacgcgtactagccattattgaagcgcaacgccaaagtattatcgctggtgattttacacaagcgatgtttgaacaaaccaaattagccttaattaatcaatttaaatcaagtcttgatagcccaggttatttgggccaacaacagttcaatcaaatttttgtccccgaaacggaactagacgcgggtcgattcacgaccgctattttggccgtttctaaacaagcggttcaagaacaagccgctaagatgcaactgcaagcaatctacttcttgaaaggggtcgacacaaatgaagcttagacaaaatccccgcttaggtgaaaccctctatgaagaaactctggaaaatgggttaacggtcaaactctatcctaagagtggttatcacaagacctatgccattttaacgacagactatggtgcaattgatacgacttttgtgccagcaggtcaaactgactatgtgacggttcctgacgggattgcacatttcttagaacataagttatttgaaaaggcggattatgatgcctttgaaaaatttgggcaatttggggctagttcaaatgctttcacgagcttcacgcgaacaagctacctcttttcaacaaccagtcatttgaaggaaaacttggatatcttgcttgattttgtgcaagaaccctattttacaactgcaacggttgataaggaaaaaggcatcatcggtcaagagattcagatgtacaatgatgaaccagattggcgcttattttatacggtaattggcaacctttatccacaacacccagtgcgaacggatattgctggcaccatcgaaagtattgcgcaaattacgcctgaagaattgtaccaagcgcaccaaacgttctaccaaccaagtaatatgaatttattcattgttggtcagatcgatgaccctgaagaagtattgtcgtgggtcagcgctaatcaagacgctaaagattttgtagcaccaagcgacattaaccgctcattaccagaagaagaagctgacggcagtgacattattccgtaccgctcattagaaatgccggtgacacgcagtaagagcatggtcggtattaaagggttaaccgattttggaactggtcaagaagcactagaaatgaaaattaagatgaacctgttattagaattactctttggggattcatcaacacaagttcaaaaattatatgaacaagggattttggatgacagctttggctatgaatatgccattcaacgctcatttaacttcatcacgcttggtggcgatacagatgatgcacaaggcttatcagatgcgttgatcaatattttggaacattatcaggaaagtcctgatttttcagaagccaatttagcgttggttaaaagagccgcaatcggcgaatatctacaggcctttaattcattagaagcaatcgccaatcaatatagcgacgcctttttcgatgaagtaagtccgtttgatgtgttaggtttaattgaacaagtgacattagcggatttggcacaagttgctgccgaattcttcaaaattgaaattatgacggtttgccatatcttaccagaggtggcgcaataatgagttgctcagctttaattattggcgcctccggtgatattggcgccaccattgccgaacgcttagcagcggacggctggtcgctttatttgcactacaaccaaaatcaagaacgtatttgcaaactacaacagcaacttagtcaacagtatgcgcgccaagacttttttgcacttcagttggatttaacgatgggcactggtgcggttgaccagttgaaaagtcagctgtttcaagtggatgcggttatttttgccgctgggatgacgacttacggcttattgccagaggtctctgcagagcaaattgatgcgttgtggcaagtgcacgtgaagacaccgatgttgattttacaggctttgcagtcgaaattagcacagagtgatttgggccggattgtttttattggctccatttatggcggtcgtggtagtgcgatggaagtaccgtacagcacggtcaaaggcgcgcaatcggcgtttgccaatgcttacgcacaagaggtcggctcgctaggcattacggttaacgtgattgcccctggcgcagtagccacgaaaatgaatcaacagtttacagcagatgaacaagcggcgattgccgctgagattccaactgggcgttttgcgacgccaacacagattgcttattgggtccagactttgttagcaccagaagccaattatttaacaggacagacaatttatgttgacggtggttggctaaaataaagaaatcttaatacaatatcattgtggcaatatgctataatgacgagtaatgataatgggataatagtgggtggaattcaaatgaacgaaattggtcaaaaattacgtgaagcacgtattgaaaaaggttatacattagatgatttacaacaaattacgaaaattcaaaaacgctatttaagttcaatcgaagagggcgatttcgatgcgctccctggtactttttatgtgcgtgcgtttattaagcaatacgcacaaacggtgggtgttgatagtgaagccttattagctgaatatcaagataagttgcctaacgcaaaaccagaagaatacgttgaaaaatcagttgaaaatcaaacgcgattaacacgcgaaacaaccgactctaaatggtcaaaatggcggggattagcaccacaaatcgccgttgttgctgtcgtgattgtgattgttgggattgtctatggtattacgttaagtaatcgtggcaagaatcgggaaacattaactgaaaccagttcatcagtgacggtttcaggtgaccaatcaacaactaaaaaagcaagctcagacgataatcaacaaaaagcacaagaaagcaaggccaaagaagcttctaaagcaagcgaacaatctaaaaaagaagctgacaaaaaagcaaaagaaactaagttatcagcttcaatgacaagtatgagtggttcacaacaagcctttacaattaaaaacttacctaacaaagccaatacattgacgttctcagctgaaaacacaacagcttgggtgggcttaattgtcaatgggtcaacaatctggcagggttctgttacaccaggaactgatcaaacaacgcaattaccagctggggtaacacaattctcagttaaaactgggaacgggcctgcaacgaagatgaagattaacgacacagctgttaatttaaatcctaataatgaaacagttcaggttcgaacagtgaactttacagcaacacttgcaaaataataaagagatgtgagaggtctatccgatgaatttaccaaataaattgacgatgtttagaattattttaattcctatttttacaatcctattagcgtttaacgtaccggcaggtgaagtactcgttgctggaacggctattccagtcagtgaattgattgcaacggtgatctttattgtcgcatcattgacggatttgttagatggaaaaattgcacgttcacaacatttggtgactaactttggcaaattcgctgatccactagcggataagttattggtaatgacagccttcatcttccttgttgaactcggtgcagcacctgcttgggtggttgcgattattatttggcgtgaattagcagtgactggcctcagattacttttgagccaaggtggggaagtcatggctgctgccatgcctggtaagattaagacgacaactcaaatgttggcgattattttattattcttgcataacgtgttctttgcaaatatcggcttaccaatggctgatatcatgttatacgtctgcctattcttcacgatttattcaggcacagaatacttcatcaaaaatcgtggtatcttcaaggattcattttctaaataatcaacaaaactggtcgctaaagcgggccagtttttttattggcaaaatccccgcgaattacgtattatagaatgaccgaataaatatcaagaacgtttgttcgattttaacttgcttttgtttaacgaaatctgtaaactaagagagtaatgaaatgtactcttttaaggagggtcacttaattggctaaagatgaaagacaagcagcacttgatgctgccctaaagaagattgaaaagaattttggtaaaggttcaattatgcgaatgggtgaaaaggttgatacacaagtctcaacagtttcatctggttcattggcattggacgaagcgctcggagtaggtggttatcctcgcggccggatcgttgaaatttacggtcctgaaagttcaggtaaaacaaccgttgcgttacatgctgttgcagaagtgcaaaagcaaggtggaacggctgcttatatcgatgctgaaaatgcgatggatcctaagtatgcaacagcacttggcgttaatattgatgacttactcttgtcacaacctgatactggtgaacaaggcttagaaattgctgatgccttggtatcaagtggggccgttgatattttagttgtcgattcagttgccgctttggtaccacgtgctgaaatcgaaggtgaaatgggtgacgcccacgttggcttacaagcgcgtttgatgtcacaagccttacgtaaattatcagggacgattaataagacgaagacgattgcgttattcattaaccaaattcgtgaaaaagtcggcgtgatgtttggtaaccccgaagtcacaccaggtggtcgtgctttgaagttctactcaactgttcggcttgaagtgcgtcgtgctgaaaccatcaaaaatgggacagatatgattgggaaccgggcccgaatcaaagtcgttaagaataaggttgcgccaccatttaaggtcgctgaagttgatatcatgtacggtcaagggatttccagaaccggtgaattggttgatatggcggtcgaaaaagacattatcaataagagtggttcttggtactcttatggctcagaacgaattggccaagggcgagaaaatgctaagaactatttggctgatcacgaagatgtcgaagatgaagttcgtttgaaggtcagagcagcttatggtatttcagatgtacctgaagaagatctcccaacaactgaagatgaacaaataaatattttaccagatgattcaacagaagaataaagcatgaccaacaggagccaggccaaaacttagttttgtactggctcctgttttaggtatatccgaataatcaagaccaatgcctgacaaatcaagacttatagggtctactaccgaatgggattgctgagaagccagcccatattcgcgattcaacagtagggtgattaattatatctaagaacttaatgcaagaagagacggattaaccgaataaacggatagcaatcgctccggtaaacggttgcaatgctgatactttaagttgacaggcggtttactaaactataaaataactatgtgttgaaaaattaaacataataacatctttaaaaatttgcaatgtgattgcaatttaaaatttttgatgatgcggaggtgaaaaaatgaacttagatttgctattaatccttaccgcagtcatcatgttaatcgtcggttttgccgttggtgcaattttgcaaaagaaggcccacgaacgtgaaattgatggtgcaaataagactgctaagggaataatcgaattagctgaaaaagaagcggcaacgcgtaaaaaagaaattcttttggaagcaaaggatgaaaatcatcaatatcgctctgaaattgaaaatgaattgaaggatcgacgtggtgaagttcaaaaacaagagaatcgcttaatacagcgtgaagaaacgatggatcggaaagatgcgacgctcgataaaaaagaacggacactggaagaacacgaaagtcgtttggctgagcaagcgcaacaattaaaggaaaagcaagcagaagtcgaaacgttagttgaacaacaacggacgaagttacaagagattgctgaactttctcatgatgatgcgcaaaagatcattttggacgaaacaaaacggaacttggatcacgaacgtgctgttttaattaaggaaagcgaagaatctgctaaggaacatgctgatcggacagctaaaacattagttgctgaagcaattcaacgtagtgcagcagatatggttgccgaaacaacagtgactgttgtgacgcttcctaatgacgatatgaagggccgaattatcggtcgcgaaggtcggaatattcgaacacttgaaacgttaactgggatcgacttaatcatcgatgatacaccagaagcagttgttctaagtggtttcgatccaattagacgtgaaatcgcacggatgaccttagagaagttaattcaagatggtcggattcatccggctcgcattgaagaaatggtcgataaatcacgtaaggaaatggatgaacaaattcgccaaatcggtgaacaagccatttttgatgtcgggattcataccatgcatccagacctcattaagattctaggtcgtttacacttcagaacaagttatggtcaaaacgtcttgaatcactcaattgaggttgctaaattaacggggattttagctgctgaattaggcgaagatgtcacactcgccaaacgtgctggcttattacatgatatcggtaaagcactggatcatgaagttgatggctcacacgttgaaattggtgttgaacttgcaacgcgttataaggaaccggcaacggtcattaacgcaattggctcacatcatggcgatattgaagcaacatcaatcatttcagtcttagtagctgcatctgatgcaatttcagctgctcgtccaggggcgcgttctgaatcacttgaaaactatattcatcgtcttgagaaacttgaaagtattacgaatagtttcaaaggtgttgatcatagttttgcaatccaagccggccgagaagtccgcgtgattgttaaaccagaacaagtcacagatgatcaagcaactgtcttagcacgtgatgttaaaaaccagattgaagatcaactcgaatatcctgggcacattaaggtcacagttatccgagaaacaagaacagttgaatatgctaagtaatttttagtgagtatattcttgggggtgggcaattaaatttgtcgcaccctctttttttgaatttcattaagaaatcaagtcctagttgtgtttatgagctgggatttgtataataaagtgaatgttagagaaagtaggcgaatcaaatgatgcccatgtttagaatcatcgttgggttgtttgcgaccatgctcgtttcggccgcaattacaccgctcgttagacgcttagcttttgtcttaggcgcggttgataaacccaatgctcgccgagtgaataagaaagcaatgccctcaatgggtggtttggcgatttttattgcctttaatgtaggcacttttattctattgcgcggacagtttccgacgcacgaactatttagcatctttttagcagaatgtattatcatcatcaccgggatgattgatgatatcaaagaattaagccctaaagaaaaaatgttagggattttaatcgctgccttagtgatttacttcttagcgggtgtgcggatgaatatcctaacaattccgcttgttgggactttcaaattaggatggttaagttttccaattacaattttttggatcttagcgattaccaatgcggtgaacttaattgatggcttagacggtttagcgaccggggtctcaatcatcgcgctattcacgatgggtgtaattgcctatttcttcctatcgattaccaatgtgagtgtttcaattatgattttctgcttaggggctgcgttaatcggcttcttgccgcataatttccatcccgccaagattttcttaggggatacgggggccttgtttataggtttcatgattgcggtcctatccttgaaggggttgaaaaacgtaaccttcattacattattgattccagttattattttaggggtcccaattacggatacggtttacgcaatgttacggcggatcttaaaccgcaaaccaatttcacaagcggataaacatcatttacatcaccgcttgatgcaattaggattatcacaccggcaaacggtattggttatttacggtttagcgttggttttctcactcatttcgttactatacccattatcaacattgtgggggagcttagccttaacaatcgcggtcttgattggcctagaattgtttgttgaatcaattgggttagttggcgagaatcgccaaccactattacacttactaaaacgattattaaaacctaaagacgaagaaaaggattagccactggctaatcctttttttgatggttatttttgataacgcaagtcgtgaatcgcttgcgcgctgatggggacttcgttaaattgttgttgtccaagccctaaggtgagctgaccattgagcaattccgtcatttgggcctcaaaggcagggacttcttcggtggggagccagaccgttagttggatattggttgtgtattgaatatcctgagcaatcaaatccagttgtgctaagcgattttgaagggagtcaaactgtgcataatcaatggttaaatgacaggcagtttgttcgattccttgaacgataccgagatgctcgagagcagcggaagtcgcgtggctataagcacgaattaaaccgccagtgcctagcttagttccaccaaaataccgagtaacgacaacacagaggtttgtaagttgcatttgacgcaagacttcaagaattggcacacctgcagtgccgctaggttcaccatcatcgctttgcttttgaatattagcaggttgtcccagttgataggcgaaacaattatgattagctttcgtatgtgttttacgaacttggtcgatgaagtcttgggcagcggcttcatcgctaacccgagcgatttgacaaataaaacgggactttttaatttcaagttcaaactgcccgtctgcttgaacggttaaataactttccatggaggtcacctcaaaaaaataaattccgattgcgtatgttagttctaaaggagcaaatcaaatgggacaacaagtaattgcctgtggtcgccagtttacggcggcccagttagccgatacgcaaaataataactatagtttaccacagattaagcggcgacctgcgtttttacgggtcaagcatcgcctagtctgccaacgttgtcagcaagtggtgccgccgcaaacctgcttaccagatgggcgccattattgcgcgcaatgtttgttatttggtcgtttggtagagggcgattggttatacacggtaccggagtgtcatttattcgaaaataacataccaaagttgacgtgggaggggcaattaacaccgcatcaggaacaagctgcccaagcggtggttgaggtggttcaaacacaaaaacggcacgtattaacggccgtgaccggcgcagggaagaccgagatgctttttcaaggaattttagttgcgcttcaaaagggtcagcgggtatgtctggcagcgcctagagtcgccgtttgcttggaactttatccgcgcctgcaagctgcctttgcaacggctagtatcatgttgatgcacggtgagcaaactgagccctatcgctatacgcagttagtgatttgcacgacgcatcagttgctgaagttttatcacgcctttgacactgtgattgtcgatgaagtcgatgcttttccttttgttgataatcccgttttagtcacggcagttgaacaagcctgcaagccccaatgtgctttattatatttaacggcgactccgacccccgctattaaacgggcaattgctgctaaacaaatgacggttagcgaattaccgctccgctttcatggtcatctattaccagaaccacataggcacgtcgcttttaattggcgggcccaattaaaaaaaggtcggttacctaaacgacttgagcgggattgccagacttgtttaaaaacacaacagattttgttattcgtgccgcaagtgcggttattgcaaccagttgccaatcggttatcaaccttattgccggcggtcaggattgaaacattgcatgctaacgatccggatcagatcaaaaagattacggcgtttagagcacaacaaattcagctaatggtgacgaccaccattttagaacggggcgttacgtttaaaaacgttgcagttttggtcttaggcgcggaacacatggtgtttaacgaagccgttttggtccagattgccgggcgagcgggacggcataaagattacgcccaaaatccggttcatttttattatcaagactatacgcgggcgatcaaaggcgcttgtcggcaaattaaggcccaaaatcagaggggacggcgattacaatcaactgtttaatgtgccacaatttaattatcgaaaagccaagtatcaagcaacttttgcaattaaaaccactacttaatccgcatatctgccaagtctgtttacagcagtttgaacgcattagtggtcatcggtgttcggactgtagtcgaccgctgctaacgggtattttgtgccctgattgtcagcagtggcgacaacgttatcctcagcagcatcttaaaactcaggcgctgtttacttataaccgagcgatgcagttatattttcaacgttataagggccaaggagactatcaattacggctattattcgaacgcgacattcgaactcggtttccagtaaaatccaatgtaacttacgtgcctattccatctgatgagcaacatcaacaagaacggggctttaatccagtccaaggcttattcgaaacttgttttccgttaacatcgttattgaaaaagcggccgacagagaagggtcaagcacaaaaaaatcgtgcagaacgtcttgcaagtccgcaattttttgaattggtaccgcaaaaattaccgcataagccgcaatcgataataatcttggatgatatttatacgacgggccgaacggtgtggcatgcacaacaatgtctgcgtgctaattatccccaagctacaattaatgcgattactttagccagatagtaatcgttttatttgtctattggccgcaatttatatataatgaacttagtaacaaagccccaataatctatcaattattgggtgacaaataaccaatggggttatttgtgaaaggggagaaatcatatgctaagttttaatgtccgtggagaaaatattgaagtcacagaagcaattcggagttatgttgagaagaaaatcagcaaactcgaaaaatattttgatgaatcagctacagcaactgcacacgttaacttgaaagtctatcctgataaaacagcgaaggtcgaagtgactattccgctcccttacttggttcttagagccgaagaaacatcaccagacatgtacggtagtgttgatctggtaactgataaactagaacgtcaaattcgtaaatataaaacaaaaattaatcgtaaatcacgtgaacgtggtatcaagggtgttgaattagtggtttcttctgaagaaactttaccagaagaaccaatgcaagttgttagaactaaacgtgtttcattaaaaccaatggatagcgaagaagccatcttacaaatgaacatgttaggtcatgaattctttatctttgaagattcagaaacaaatggcacaagcattgtttacaaacgccaagatggtcgttatggtttgatcgaaacagatgaataaaaaattttaaataaacatcgtgaagggctcgagacaaacaaaatagtgtttgtttcgagccctttatttattttcagaataagactataggtaatagggttaattttatgcctaatcgcatgtatttgtttaagcatcaggttttaattgactgtaataaatgttagaataagatgttagtggtccagtaattctaaaatttaattaaaatcatagtgatcagaattttcagaggagaattataatacatggcaaattttctaaaatcatgggtagaaagcgataaacgtgaagttggacgaatgggcaaaattgccgataaagtacaatcttatgaagatgaatacagtaatttatctgacgaagcgttacaagctaagacacctgaatttaaaacaagattagcaaatggcgaaacattagacgatattttacctgaagcattcgcggtcgctcgagaaggcgctaaacgtgtgcttggtttattcccattccgggttcaaattattggtgggattacattacacgaaggtaatatcgctgaaatgaaaactggtgaaggtaaaacgttaaccgccacaatgcccgtttatttgaacgcgcttgcgggtcaaggggttcatgttgttaccgtcaatgaatacctttcaagtcgtgatgcgactgaaatgggtgaattgtataactggttagggctttcagttggtttgaacctaaacgcgaagacccctgaagaaaaacgcgatgcttacaactctgatattacgtactcaactaatagtgaacttggctttgattacttacgtgataacatggttgtttacaaagaagaaatggtacaacgtccattgaactttgcaattgtcgatgaagtggattcaatcttaattgatgaagcccggacacctttgattatttctggacaagcagaaaaatcaacggcactttatatccgtgcggaccgctttgtgaaaaccttaaaagaagatgcagattataaaatcgattggcctacaaaaacaattagtttaacagaagccggtattggcaaagctgaagctaattttggtctagataacttatatgacattgaaaatacagctttgacgcatcatttggatgaatcattgcgtgctaatttcatcatgttgaaggatatcgattatgtggttcaagatggtgaagtcttgatcgttgatcaattcactggacgtgtgatggatggtcgtcgttattcagatggcttacatcaagcgattgaagccaaagaaggcgttgaaatccaagatgaaaccaaaacaatggccaacattacgtatcaaaattatttcagaatgtataacaaactttcagggatgactgggacggctaaaaccgaagaagaagaattccgtgaaatttacaatatggaagttatctcaattccaactaaccgcccaatcgcacgtaacgataaatcagatgtgttatacccaacgcttgaaagtaaattccacgccgttgtgaaggacatcaaatcacgttacgaaaaaggccaaccaacattagttgggacggttgcggttgaatcatcagaattactatcacgtttattagacgaaaataatgtgccacatgctgtcttgaatgcgaaaaaccatttcaaagaagctgaaatcatcatgaatgctggccaacggggcgctgttacaatcgctactaatatggctggtcgtgggactgatattaaattaggacctggtgtcacagatttaggcggtttagctgttatcggtactgaacgtcatgaatcacgacggattgataaccaacttcgaggccgtgctggtcgtcaaggtgatcctggtgaaacacaattctatatgtcattggaagacgacttgatgaaacgttttggttcagaacgaatcaaagcattcctagatcggatgaagatttcagacgacgatgctgtcatccaaagtaagatgattacgcgccaagttgaagccgcacaaaaacgggttgaagggaataactatgatacacgtaaacaaacccttcaatacgatgatgtcatgcgtgaacaacgtgaagtcatttataaacaacggatgcaagtcattatggcagaagacaacttaaaagaagtgattatgccaatgatttcaagaacggttaaacgaatcgttcaattgcacacacaaggtgatacagcagattggaaccttgaagcaattcatgattttgcaacgacttcaatggttagtgaagaacaattaacacttgagaagttacaaggcaagtcagctgaagaaatcgaagcattattgatgacttttgcagaaaagaattatgcaacaaaacaaaaacaattatctgatgaaaatcaaatgcttgaatttgaaaaagttgttattctccgtgttgttgatgaacgttggacagaccacatcgacgcaatggatcaacttagaaattcaatcggattacggggctacggtcaaatgaatccattggttgaatatcaagaagaaggctacagaatgtttgaagaaatgattagtgatatcgattacgatacaactcgactcttcatgaaggcggaaattcgtcaaaatattcgacgctaattaacgaatggctgaggcaattgacttagccattttttaatggcatgaaatcaaaaagaggttaatcaaatggaattaagtgaagcaagacatttattaaacgaaattgagagtaaaataacgcagttcagggggtctctttgacttagaaggccttcaagaaagcatcgcacaaaatgaagcacagatgggcgatcctgatttttggaatgaccaacaatcagcgcaacaattaattgatcaaaataatgtgttaaaggaaaagtatgattcttttaaccaattacaggcgcagtttgaagaattgagtgtcactttagagttattacaagaagaacctgatgatgagctacaggcgagctttgaagccgacttagagcagattcaaagtcagatgcgccaatatgaattggggcaattattatcaggtgaatacgacagcaataacgcaatcgttgaattacatcctggtgctggcggaacagaatctcaagactggggtgcgatgttattacgaatgtatctacgttgggcagatgcgcacggttttaccgtagaaacagaggactatcaagccggtgaagaagccgggattaagagtgtcactttgatgatcaagggccataatgcctacggattattgcgctctgaaaaaggggtccatcgcttagttcgtatttcaccatttgattcagccggtcggcgccatacatcattttgttctgtcgatgtgatgcctgaattagacgggtcaattgatatcgaagttcgcacagaggacttgcgggttgacgttttccgttccagtggggctggtggccaacatatcaataaaacctcttcagccgtccgcttaacccatttaccaacgggggttgtcgttagttcacaagcacaacgatcacagttgcaaaatagagaaactgcgatgaacatgttgaaagccaagttatatcaaaaagaacaagaagaacaagctaaaaaagcagccgctatcaagggtgaacaactcgaaattggctggggttcacaaattagatcgtatgttttccacccctatacgatggttaaagatcaccggactaattacgaaacaggtaacggtcaagccgtcatggacggtgatttagatccctttatgtatgcgtacttacaatggcaattgagccaaaaaaatccgaattaagcttggcagagggattcgttagagtttactaattttgatgccgaataagtaagacggcatgctataataagatacgactagttttttttgtagattacatgatgaacaattaaaaaggagtgttacctcagtgattcgaatgacgaatgtgtccaaagaatatccaaatggtgtcacagcaatcaaggatttatccgtaacgattgatgctggcgaatttgcctatattgttgggccaagtggtgctggtaaatcaacatttattaagatgttatatcatcaattaaaggccaccagtggtgaaattgaagtggctggttttgatttagtgaacatgaaagatcgggaagtcccttatttacgccgtaaagtcggtgtggttttccaagatttcaaattattgccacgattgacagtttttgaaaatgtcgcttacgcaatggaagtcattgaagctgaacccgaagtcatccaaaaacgagtacttgaagtgcttgaattagtgggtctaaaagccaaaaatgatcgcttccctaacgaattatctggtggggaacaacaacgagttgctgttgcacgggcaattgtcaactatccagaagtcttaattgctgatgaaccaactgggaacttagatccagaaacgtcagaaggcattatggatattttagaagccatcaacaataaagaaacaattgttttaatggcgactcataacagacaaatggttaacgaacggacgcatcgtgtcttagcgattgaagatggtcgtttagtccgggatgaaaaagaaggtgagtatggctatgaagattagaacgttgaagcgccatttaaatgatagttttaagagtttaaagcgtaatggctggatgtcagtcgctgctgtcagtgctgttacagtcacattactattggtcggcgttgtttttgcgatgatttttaattttaataaaatttcaaatgatatcgaaaatgacgtgcacgtccgggtaatggttgaacgtggtacaaccaacgaccagaaaaaccagttagaaaagaaacttaaaaaaatggcgtccgtcaaaaaagtcacttattcaagtcggaaaaaagaattgaataaggtggttggtagttacggccaatcattcaagatgtttaccggcgacgataatccactttatgatgtttatatggtcagcacaacgaatcccaataaaacgattggggtcgctaaaaaggctaagaaattagcgcacgtttacgacgctacttatggtggtaataatgctaagaaactctttagcgtgatgaagaatatccgcaaatggggcttaggctttgcagcgttactcttattcgtagctgtcttcttaatctcaaatacgattcggattacgattttatcacggcgtgacgaaatcgggattatgcgtttagttggggcaactaatgcctatattcgctggccattcctctttgaaggggcttggaccgggttattaggggtaattgttccggttatcgtaatcgattttggttatgtctgggtttataatcatatggccctcagcatggcttctgccggttactcactcttacgaccaggcatgttcttattccaactcgatttaacaatggctattttagggattgttatcggggccttgggatcagtcgtttcaatgcgtcgtttcttaaaaatctaacaagtaatcatactgatttacaaaaaggaatctcagctttttagccggggttccttttttagcgtttttaagggctaggcagttaacggggcaaaatgctatacttatggggaaagttcggcggtctgttcgacagatgcgattggcatcgttttcaggttggcgggattgaataggttggagggtttatttaatggagatgttcgttaatatgttgcttacctttttcacgacaccattgttatgggtggcgattgtgtttgctttttggttagcgctacatcgtatcaaacatgaacgacagacgtttagaattgccgttaatcctaagtggccagagttgaaactattttggtggcacgggttattagcgggtttagcgctcagttgttgtaccttgttgttaggcgtcacaattaatttaaattggtggttagtctaccaaattgtcgcggtagtagccttatttttgatgccaattggttttgcgggtaacgtcttaatactattaagtgctttattgtatttaatcagtgcaatgatttggccacaatatcaaattctagcgggtaatagtttgctagcagaactgttaattgtagcaggcttaattacaatcctaactggctttttacaaaagtgggatgccactaaggtggtgacaccacacgtcatcactagcagtcgggggcggatgacagcgatgtttacgagccgtcaaatctacttagcacccgttttctttttagtaccaggcactaatcagttacctgattggggcttttggccagtcctacatattggtcagcaatcatttaacatcgtcatcttaccgttgattctcggcttttcagttaaagcgattaaagaattgatgtcagcgttagtgacgcgtgatttgcgaacgcaaatcacatttggtggtgtaattgtggttgccggtatcgttagctttatattcccaagcatcatattgagcacattaagtgttgcgttgattatctgttttatcttacaatggcgattgagacgacaaagccgggcaaataagcaacattttacaaaaccgtatgcgggtattcgtattttgggggttctcgaacaaacaccagctgctaaaatggggttagaagctggggacgtgattgtggaatgtaatggtcaagcaatttcaaacaatgaaaatttctatcaagcgattcaaagccattcgacttattgtcatttgaaagttcaagatcttcagggtgaatatcgcattacggaaagtgcagtttttgccgatgcaccccacgaattaggtgttattttatttccagagaattaattagagaaggatgacattgatgaaaacgattctagtggtagacgatgaaccagcaatcttgacactgttgagatataatctggagcaagaacatttcaaggtaatgacggcaacggatggcgcccaagcgctaacgatggccttacagcaaaaatttgattttatcattttggatttgatgttacccaaactagatgggattgcggtaacgaaaaagattcgggaagctaaattaaaaacgccaattatgattttaacggctaaggacaacgaaacggataagattgttgggcttgaagttggggccgacgattacgtgacgaaaccttttagcccccgcgaaatcatcgctcgaattcgagccattgaacgtcggaccactcagcctattgaacaacccgttgaacaggcgtctgaaacgattgtggtcggtgatttaagtgtggacgaaaccgaagtaatcgcaaaaaaaggcgatcataagttgcacttaacgccgaaagaattcgaattattagtgtattttatgcatcgactcaataaggtgcaaagtcgtgaaaaattattaaatgccgtttggggattcgattacccagctgaaacccgaatggttgacattcaagtgagtcatttgcgtgaaaagattgaagatgatccgcgccaccccgtttatctgaaaacggttcgtggttttggttatcaattggaggatcccgcacatgaccaagcatgatcaagtgagattttataagctagccactattttagtggctatttacatagcctttattctgctcattaatttagtcatttatcgccagcaaagtgcgacactcaaagaacggcgtgccgattacgccttaattgtgaaagacgccgactttaagcgtcaaaaatggctacaacaaaataaattacaagttgttacttcacagtcgccacagcacaccaagttggaacggtcagtggccgatgttttaaatcgtgatcataccacgcgcaattttagtgttaggcaaaagattgatggccgttggtatttagttgcggttcatcaatcgagtcagccaacgtttgtcttattgatgccacaacaacgcttctggcatacctggccggaaatcgccttgacagtgactgttttgtatctactgtttagtctgattgttctctggcaatttaaacggcaacgcagctatttttacgagcacttgaagattttggtggccaatattcatcatattcgctacgaagaaacgccagaaccaattattttccaaaaggacgcgtcattatacgtcctcgcacacgaagtgaaccaattaaacaaggatatgcgtcacatgcgtcaaaaaattgccatccaacaaggcagctttgatcggttgattgatcatttaccggtcggagtaatggtgattaatgaaaaccgccaagttgttttgcataacgaggcgatggggcagttattagaaaccgcaatcgagcctcagaagcacccgtatatcgatgatattaagacttatgaattaacgcggatgattgaacatactttccgttatcggcgcagtcaccatcaagagattcaactcattcagaatcgggaacgatttgtcgatgccaatgtggttcagttaaataccgtgaagtctaaatttcaggcgttagtgatcttgtatgatttaactgatattcgccgagttgaacagatgcaactcgactttgttagcaacgtcagtcatgaattgaagacaccggtgacggcaattacaggctttgctgaaacgctgttggcaggggccaaggatgatccggaaactttacagcagttcttgaagattatttacgaagaaagcacgcgcctgacagccttaattcaggatattttggcgttatcacacttggaccgtcaagatcaaacacaggctcaagacattgcgctaaaagcgatggtgacagctaatttagagttgatgcaacaaaagattcaacaaaaagaaattcacgtttccgtcaatataccagagacgttgacgtttaagacgcaaaaaatgaagttaaaccaagtcttgaagaatttgattgccaacggtatcacctataataaacaagcggggtctcttgtgattgcggctcaagtcgatcatcaacaattgataatccgagttgttgattcaggattaggtattccaagtgatttacaagaacggatttttgaacggttctatcgcgttgatcaggctcgggcgacacataagagtgggactggattaggcttagcgattgccaaggaaattaccgaaagtattggtgggcaattgacggttgaaagccaattaggggtcggtagtcagtttattttaaccttccccttaacgtgatttacaaaatatttacattcaatagtgttagattttacaattcttttctataattaatcaaagggtttaaatggaattcgtggaggattagcatgcgtaaacgtagtgttattggcttattagtcacattcgttgtattactattaactggttgtcaatctaaacaaaatgggcaatcagtcacggcagttgggtcatcggccttacagccattgattgaagcgttagccgaacaatacagtgcccaacattcaggtcagtttattaacgttcaaggtggcggttctgggactggtttaagccagattcaagaaggcgccgttcaaatgggtaattctgatttattcgcagaagaaaaagctggcattaaagcgggcaaattagtcgatcataaagtggcggttgttggtattacaccagtcattaataaaaaaattggcgttaagaatttatcgctgacgcagttagctaaaatctttagcggcgaaattacgaactggcagcaagttggtggtcctgatcaagaagtagtcttggtcaaccgagcacaaggtagcggtactcgttcaacctttgaacaatgggtgatgggtaatcgcaagacaaagccagcgcaagaacaagattcaactgggatggtccgttcaatcgtggccaatacacccggggcgattagttatctagccttttcttacgttgataacacggttgcaacgcttaaactggatggtgttgcaccagatgatcaaaacgttatgaataacacttggccaatctggtcatacgaacatgtttatactaaaggtcaaccaacgggattaaccaaggaattcttggcctatgttttatcggataagattcaaaataaacaagttagcaaaatgggttacatcccagtcgcacaaatgcaagttgaacggtcgttagacggcacaattacgaaggttaagtaggtggcaaaaatggatccaattaaggcaagtttactgaaaaaatcacgggcggcgaaaaccgaaagccgaggaaaattaatcagtttattgtgtatcagtttaatcgtttttatcgttctggctattttttactttgtggcttctaaaggactcgcaaccttctttaaggataaggtcagcctatggcgctttttaacgcaaagcgattggaatccaagtcttaaggatagtcatggtcggccagaagttggggcgctcccaatgattatgggctcgtttggcgtgacgttcttggcagccttattggcaacaccatttgccattggtgctgggatcttcatgacagaaatttcacctaaacggggcgaaaagattttacaacccgttatggaattactggttggtattccatctgttgtttacggttttatcgggttatcagtggttgtcccaacaatgcgccatatctttggcggcagtgggtttgggattttagccggaacctgtgtgttgttcatcatgattttaccaacggtgacttcaatgaccgtcgacgctttgaagagtgtgccacggcactatcgggaagcatcattggcactaggggcaacgcgttggcaaacaacttggaaggttgttttaaaagcagcgacaccagggattttaaccggggttgtcttcgggatggcacgggcgtttggtgaagcacttgccgttcaaatggttatcgggaatgcggccttaatgccacataacttgatttcaccagcctcaacattaactagtgtcttgacaatgggaattgggaacaccgttatgggctcacttgccaataacgccttatggtcattggcactgctcttattactaatgtcactattatttaacttattagttcgtttaattggtcggaagggagcaatgggtcgctaatggatgcaaaaaaatgggataaagttgcaaccggcgttttaacactaatcgctggcttaattgttttattattggcaagtttactaggttatatcttaattcgtgggttaccgcatgtgacttggcaattcttgacgaacccagcgtcaacctttacaaaaggtggcgggattggcgttcaactctttaattcattctacctattggtaattgcgatggtgatttccgtgccactttcaattggtgctgggatttacctcgctgaatacgcgcctaaaaactgggtgacaaatgtcgtccggacggcaattgaagttttaagctctttaccatcagtcgttgttggtttgtttggtttcttagtcttcgttattcaatttaaattaggcttttcaattttagctggggccttggccttaaccgtctttaacttaccattgttaacacggaacgttgaagatgctttgaaatcaattcactttacccaacgtgaagcgggccttgcgcttggtttatcacgttatgaaacagttaaacacgtcattattcctgaagcgttacccaatattattactgggatgattttaggagccggccggattttcggtgaagccgctgctttaatttacacagcaggtcaaagtgcgccttcattagatttcacgaactggaatccaacgtatatcgcaagtcctttgaatccaatgcgtccagctgaaacattggctgtgcatatttggaagattaattctgaaggcattatgccggatgcgacagctgtttcagctggtgcatcggccgtcttgattatcgctgtcctattattcaactggttagcacgggtaatcggcaagcgcgtttaccgcaaaatgacagcagcataggagaagtttatggcagattatgatttaacaaaaacacatatcaaaaaattagcagaacctaaacatgaaattgcgttgtcaactgaagacttaaacgtctactatggtgacaaacgcgcgatgcacgatgcgtcattacaatttgaacgttatcggattacggcgttaattggggcttctggctcaggtaaatcaacgtatctccggagtttaaaccggatgaacgatcatatcgctaatactcgtgtgaccgggaagattatgtatcgggatgttgatatcaatagtgatgaagttgacgtttataagatgcgcgaacatattgggatggttttccaacgccctaatccgtttgctaaatccatttacgacaacattacgtttgcattgaaacaacatggtcaaaaggataaaaagtaccttgatgaaatcgtcgaaacaacgctgaaacaagctgcactttgggatcaagtcaaagattcattgaataagagtgctttagcattatcgggtgggcaacaacaacggctttgtattgcacgcgcaatcgcgatgaaacctgatattctcttgatggatgaaccggcttcggctttggatcccatctcaacaaacaccgttgaagaaacgttaattcgcttgaaagaacaatatacaattgtcattgtgacgcataacatgcaacaagcagcgcggattagtgattacacagcctttttccattcagggcacgcgcttgaatttgatgaaacccggaagatgtttacccggcctaagattaaagcggcagaagattatgtgtctggtcatttcggctagcatacaaggaggtttgccagttggcgaataaaattattgaatcctcagatgttcatttgttctatggtaaaaatgaggccttaaaaggcattaatatggattttgcagaaaatgaaattacggcgttaattgggccttctggttgtggtaagtcaacgtatctgcggtgtttaaaccggatgaacgatttgattgattccgcaacggtgacgggcaagtttttacttaatggtcaggatatttatgcgcctgagatggataccgttaaattacggaaggaagtagggatggttttccaacaacctaatccattcccattttcaatttacgataatgttgtctacgggttacgtttatcaggcgtgaaggatcaccgcgttttggatgaagcagttgaaaccagtttgaaacaagctgccgtttgggatgacgtgaaagataagctccacgaaagtgctttgtcactttcaggtgggcaacaacaacgggtctgcatcgcccgggtacttgctgttaagcctaaagtcatcttaatggacgaaccaacatccgcactggacccaatttcgagtacaaaaatcgaaaatatgttgctagaattgcgccaacagtataccattataatggtgacgcataatatgcatcaggcttctcgtatttcggataagacagcattctttctacaaggtgaattaattgaatatgcaccaacgaagaaaatcttcttaaacccaaccgaaaaagaaacggaagattatatcagtggccgttttggctaagaaagaagggaatagcatgcgtagactttttgaagatgaattgaatgaactgcacgttcgtttttccgaaatgggcatgatggtcaatgaagccatctataaatctgttaaagccttcattaatcacgataagcaattagcaagagaagtgattgccgatgatcataagattaatgaacgggaaacggatttggaacgtaagagtttcgaattaattgcacttcaacaacccgtgtcgactgatttacgaattatcgtaaccatcatgaaggctagttctgacttggaacgaatgggcgatcacgcggtctcaatcgctaaatcaacgattcgtgtgaagggcaatacccgtgtaccagatatcgaaaaagatatcgcggatatggccgacaaagtaaaacaaatggtagaagaagtcttggatgcctacgttaaagaggaccggcgccgagcaattgccattgctgaagaagatacagcaattaacgcttattcggaaaacatttacgatgactgtgttaaagaaatgcaacgtgattcagaaacagttgttggcagcatggattacatgcttgttgccagttacttggaacgaattggtgattacgttacaaacatctgtgaatggattgtttatttaagaaccggtaaagtcgtcgaattaaattcaaacgacaaagaagacgaattttaaaagagtgttgtaccagccgaatatattctgaggattagcatagaatggcgaatgattgctggaagcaatcatttggtattcgtagctaaccggaagaatatggctgataaaacacgtttaagaaaagagtgcgtttaattctgctcagtttctgagcattaacacagctccgtaaataactgatgcaatcggttgtttgatgagcagggttaagcgcaggaaactagacttaaaaagcacgtttgaactaataatattcgccaatcaaaaaaggggcggtagacaaaagcgattttgtcccacccctttttaatgtttaataaagaggagtcgtaacaatgcaaaagcaaatttacttagcgggtggctggttcacccctaaacaagcagacatggtggcacgcgcccacaaagcgttggcagctaacccaacagttggttatatccatagtccacaagaacatcaatacaaagatgttactgaagataatgatcctaacggtttattcggtggttacgaatgggctaaccaaacttatcaaaacgacatcactgccatggacttagccgatatggccgttgttttatgggatatggctgatgaagacacaggaactgcgtttgaagtcggttatcttaacgcaagccacacaccaattgtgtttgtttgtgaagatgacttgcaagaaaatccgattaacttaatgttagctaaaggcattagcaagtgtgtgacggatattaacgaattagaaaccttagatttccaatttgtagcgggcgaaccttatccaggtaaaatcatttaatccatattttcaaactgaaaaagcccgtctgaattatgataattcggacgggcttttttaatgcccttcttataattgcccccgttaaatagcggtttgttaaccgggttaaaaagaacaattcattttattgtaaacgattacattgcatgctatgttttacttatcaaatggacaggagtgattggatgactaaaacgttagaagcattcttgcacgaaggattagcatcattgaaggaacaggggctgtataacacaattgatgttttagaggctcataatggcccaattattaaaattaacggtcgcgaactgattaatttagcgtctaataattatttaggctttgctaatcgcgatgaattaaaagcggcggatcaagctgctacgcaaaagtggggtgttggggctggtgcagttcggccaattaacgggacacttcagattcatcaagatttagaagctaagattgccgaatttaagggaacagaggcggcaatcgcgtttcagtctgggtttaactgtaatatgggcgcgatttcagcggtgatgactaaaaatgatgcgattctttcggacgaattaaatcacgcatcaattatcgatggttgtcgcttgtcaggcgcgaagatcattcgtatcaaacatcaagatatggcagatttagaagaaaaagcaaaggcagcaactgaaagtggtctttacgaaaaagtgatgtatattaccgatggtgtcttttcaatggacggtgatgtggctaatttacccgaagccgttaaaattgctgagaagtatcaactgattacttacgttgatgatgcgcacggctctggtgtgatggggcatgggaagggcaccgttaagcatttcggcttacaagataagattgatttccaaatggggacgctctccaaagcaatcggcgttgtcggtggttacgttgcggggacccaggcattaattgattggttgaaggttcgggggcgcccgttcctgttctcaacatcattaacacctggttcagcggctgcttgtatcacagcgctagatttaatcatggcgcaccccgaatatgttgatcagttatgggagaatgccgattacttcaaggctaaattaaaagcggttggctttaaagttgcaaaatcggaaacgccaattacaccggtaattttaggcgatgaacaattaacccaaaaattctcgcaagcattggttgcaaatggtgtctatgccaaaccaatcgtctttccaaccgtaccattaggaacggggcggattcgtaacatgccaagcgctacgcacactaaagcaatgttagatgaggcagtgacggtgtatgaaaaagtgggtcgtgaactagggattatctaaattcaaaggaggaactaacatgcataaagtgatggtaacgggttgtttaggacaaatcggatcagaattagtggctcaattgagagcacaaaacggtgtcgatagtgtgattgcaacggatattcgccgaccagaccataacgaaacggttgaaagtggcccgtttgaagtgttagatgtgacggactatgatcgaatgcttaaaattgcaactgattatcaagtcgacacactcattcatctagccgcattattgtcagcagtggctgaagaacggccacaatttgcttggcagttaaatatgaccggcctcgtcaatgcattggaagttgcccgtgaattagatttgaaattctttacaccgagttcaatcggcgcatttggccctagcacgcctaaagataatacaccacaagatacgattcaacgaccaacaacgatgtatggcgtaactaaagtctctggtgaactgctctgtgattactaccatactaaatacggggttgatacacggggcgttcgttttccagggttgatttcttataagacgttgccaggcggcgggacgaccgattatgcagttgatatctactatgaagctttacgcaaaggccactatgaatcattcattaaagaagggacctatatggatatgatgtatatgccagatgccatcggggccatcattaaattaatgaatgccgatccagaacgtttaattcatcgaaacgcttttaacattacggcaatgtcttttgaaccagaacaaattaaagtcgcaattcaaaaagaactgccagactttgaaatgacttacgctgttgatccagcgcgtcaagcgattgcggactcatggcctaaccaaattgacgcgagttgcgccaaagcggaatgggattttgaaccccaatatgatttagaagcaatgactaaggatatgctggcgcaattaaaaactagaatctaattgtagtaaaggaccgggccccaatcgcccggtcttttttatgtcccaactgagtatcgctcggagtacctaaataaaaatcaacctttggacctatgacatttccaattaaaatgggcataatagaaccatagtcaagtgtgacagatatagaggtcatcatttaaaccaacggaggtcataacaatgaatgaacgtcaaagaattttagacttagtgaaccaaggtgtattaacatcctcagaagccttaatcttattagaaaatttagctaaaaacgatcaaaatacaactaaaatgtcagcagaaccagaagtccctgatgttgatgataacgaacaagaatcggcaccagaaactgatcaacgcgcgatcgttgaagaacgcgccagagaattaacaattgcgctatcaggtgttaaccgccagttacaagacttgaagcaaaaaattcaagccgaccaagaacaagtgactgtgcttgatacaatggaagatttagatagtctgacaagtgaaaaggcggctgaacgccaagcactcaaaacagctgttttacaaaaccaagctcaaattgatgacttggaagaacaacggcaaacattaacggaagaattaaatcaaattgaaaagcaacgtcggcagatggcgaagaatcaatggtctgaaaagctaggcctttcagatgattggaaagaaaatgccagcgaaacattcgatgaaatcagcggtcgtttaggtgaagcaagcctacatctcggtaaactcatgaaggaaactgctaaaaacgtgatggataacgttgactggaaagaagttaacttcaaggtgccaggtttggcaaccgaaaaattcacgcatgaatttatttactcagacgtgacaccagaaatgattaacgtcaaagtagccaacgggaacgtcgatttcaagatttgggatcaacccgaaattaaagttgtggcccaagtcaaactttacggtaagatgggtgaaccaacagcccgcgaagcttttgaagcccgcagcaatatcaatgtaacagatgctgacttggtcttccaagtgcctaataaacgcattcaagcggacttaacattctacctaccagctaataattacttacaaaccaacgttaagttattaaacggcgatattgcgctagatgggttcacagggcgtgatttataccttaaaacgtcaaatggccaattgacattgaacagtacgaatgtcgcaatgttagaagcagaaaacgttaatggtggaatcaccgttactgacggccactatgaagacattctagggacaaccgtcaatggtaatatcgtgatgaaagcccaagtgttaaatagtagtgtttcaactgttaacggcgatatcaaagcttctttcaatgataatcagttacaacatttgaaagctaagtcggttaatggtacggttaagttggccttaccacaaacgattggcttcacacttgaagctcggacacgttttgggatgatcaaaaaccggctagccaatgcgcaaacggttgatcaacaccaaagcacagggagccaaatgttacaattagcacgaaacgaagatatgcaagcagcccaattaacattaggcacaacaactggtaatatcttattaaaagacaatgaaaactaaaaaataatgaatggtggtttctgaataatggcacaaaagagattatataaatcaagagataaccggatgatttccggtgtaatgggtgggatagcagaatacttcaatgttgacgcgacattggttcgagtgctctactgtttgttctcaatcttctcagcagctttcccagggattgtcgtctatattatcttggccctcgttattccggaacggccaagtcaaacgcgtcgcgattctcatgatgaatggagtgaatattaatgccttttctattaatactagtcccaattttggcgattattctcgccattacggtaatgggcgtcttgattggttcagtgatgattctcttcaagttcgcaattccgttactagtgatttggctcatttaccgcttaattgtcggtcataataaaccacgtcaccattaccacgaacaacaacatcaagcctattacagccaaccgaacgattctcgggggcgtaaagaagcacgtgatgtgaaggtcgatgatgacaactggagtgatttttaatgcgctattggacccgcgttttagtgaatacaatcttatttatcgcaatttcgggcttactaccaggactgtttcatgttgacggtattttagtcgccttagtggcaagtattgtcttatcaattttaaacgtgctagtaaaacctattttgcatattctctcatttccaattacgtttttaacactcggccttttcagcttagtgattaacgggattatgttggaattaacgtcaatcttcgtcagttcagggagtaccttcccgaacgtcacatttggcttttctggattaggcgcggcgattgtcgtggcgttcatcctatcgattgccaatacgatcattggcaatcaatttagcagagagcgttattaatgataaagcctgcatcagaattttgatggcaggctttatttttatattaatttaagaaaacgcctacattaatgttgaaaaatgtattcaaaagcaatatgatagtacgtataagagtagaaaaaggacggtatatcatggcggatagtgtttcaatggaaagattagtgacggaccttaagttacaagtgtactcaggggaagctcatttaaaagagaaaacagtgacgttgagtgatatctctcgtcctggactcgaattaaccggttattttaattattacccatacgaacgaattcaattatttgggatgacggaagtttcctttacgcaaaacatgacggcggaagaacgcttaatgattatgcggcggatggcttctgagaacacgccttgtttcttaatttcgcgtagtttagaaccacctaaggaaatgttacaagcagctgaagaatctggtattccagtgttaggatcaaacctatcaacaacccgtctttcaagtttagtgacggattatttagatggtcaattggctgaacggcgctcaatgcacggtgtcctggttgatatctacggtttaggggtgctcatcacaggcgattctggtgttgggaagagtgaaaccgcacttgaattggttaaacggggccatcgtttaatcgcggatgatcgagttgatgtttaccaacaagatgaacggacggttgttggtgaagcaccaatgattttgcgacacttacttgaaattcgggggattggcattatcgatgtcatgaacctctttggggctggtgctgtacgggctgatacatcaatttcattgattgttcatttacaaaactggtcacaagataagaagtacgatcgtcttggttccgatacagaagaacaaatgattttcgatgtcccagtacctaagatcactgtgcccgttaaggttggtcgtaacttggccatcatcattgaagttgcagcaatgaactttagagccaaatcaatgggctatgatgcaacgaagactttcgaagcgaacctaggtaagttaatcgaatctaattctgacgacgaaaactaatttaaacgttaaaagtaccttaatatagtaggtcatccgactagattgagctatactgttataaagacaggatagtactcagtctagtttttttaattgaatatgaggagcgattatcgtgaacctaatattaggtgttttaaatccgattgccctacaattagggccgttggcgattcattggtacggcgtgattattgctagtggtgtcgtattggccgttgtgttggccttgcgagaagctaagcgccgcaatgtcagtgaagatgatattttgaatttaattttatgggccttaccgtttgctttgattggggcacggctttattatgtcatttttgaatggtcctattaccaagccaatccaagcgaaattattaaaatttggcacggtgggattgcgatttatggtggtttaattgccgcaacaattgtgttcatcatctattgtcgcaagcatttcttgtcgccgtggttagttttggatatcgcggcaccaacggttatgattgcccaagcaattggtcgctgggggaattttatgaaccaagaggccttcggggctaaaacgacgttgcacttcttagagacacttcatttgcccaattgggtgactgatcagatgttgattgatggtgcttatcgccaaccaactttcttatatgaatcgacttggaatgttttagggtttataatcattatgagtgtccgtcatcgtcaaggttggtttaaacaaggtgagattttattgagctatatcgcttggtacgcctttggtcgctttttcgttgaagggatgcggaccgatagtttatttatcggaccattacgtgtgtcacagattctatcactcgtgttgttctttggcgcgattgggctgtggatctggcgccgtaaacaacagacgttacccgactatttagaaggtaatacactgcgctcagcagttaaataaaaggagaattaggattaatgacagttaatgttgcagttttaggtgccggttcatggggcacaattttagccaacttattagtagaaaatggccaccacgtcgaattatgggggaatgatcctgagaaagtagcagagattaacgaacaacacactaacaagcattatttacccgaattcaagatcaatccacgcttacacgcaactttagatttgaacgaagcgtttgaagcagtggacgttgttttattcgttattccaacgcaagtcattcggctagtggcagaacaaattgccccagtgctagaagccaaaggggttaaacccgtgattgtcacagcttctaaagggttggaacaagggagtcataaacgaatttcagaagttttaactgaaactattccggcagatgtcagaaatggcatcgtggtcttatcaggtcctagtcatgctgaagacgttgcaatgaaggatattacaactctaacggctgcttcaactgatttagtgcaagcccaatggattcaagaaatcttcatgaacgattacttccgcctttacacgaatacggatgtcatcggtgttgaaatgggtgcggctttgaaaaacgtgattgctttaggcgcaggtgcattacacggcttgggttacggtgataacacgaaggctgctttaatgacacggggcctagccgaaatttctcgtttaggggttgccatgggtgctaacccattaacgttcatcggtttatctggtgtcggcgatctcatcgttactgggaccagtgtgcattcacggaactggcgaacagggaatgctttaggcgaaggtcaaaagttagatgatgttctagaaaatatgggtatggtcgttgaaggggtcgcaacatgtaaggccgcttatgaattagcacaacaacgctcagttgatatgccaattaccaacgcaatttacaacgtcctttatcgtggttgtgatattcgcaccgaaattggtaatttaatgcaacgttctggtaaaccagaaatcgattttaaatagaccaattaaattatttgataaaaacgccatcattttaaacgggtatcgcatccgcaaaacgaatatgttatgatgacataagttgataaaatgactaaaggagaaccgattactttatgggcgatttggtatctgtaagaccaacttgtgaattttattttgacagagggatgcaagcatttgagcgatttcattatgaaaaggcgctcacttgcttgcaacgctctaagtcactggcaaaaacgaaggatgattacatcttcgtggtttgccagttagcaatttgtttagaatcggtcggtaattaccgtggtgctgtgattgcactggaagaaattccaagtgttaattaccagacacatccggaattacagtattttttagcaacggcgtatgcttttttagggcagatgcaagagagctatcaattagcgaaagcctatttacaaagtgatgactcagattttgaagctgaggcaaccgaactattacaagaattgaaacaaattaaaggttaattagcattacggaaagttcgccgactggtcaaacagtttggtggactttttttttaataacgggtaagatacactctattagaagtaacttgataaaagtaaggagattatgcgaaatggctaaaagttatgatgtaattgtaattggtgctggccccggtgggatgacggcggcgctttatgcatcacgttcgaacctatctgttttaatgttggaccgaggaatttatggtggtcaaatgaacaatacagcagaggtcgaaaactatcctggctttaagtcaattttgggcccagaattgggcgaaaagatgtatgcgagtgccacacaatttggtgctgaatacggttatgggacagttaatagcatcgaagacaaaggtgagtttaagttagtccataccgatgaaggcgacttccaagcacgggccgtgattattgcaacaggttctgaacataagaaaatcgggattcctggcgaagatgaatacggtggtcgtggtgtctcatactgtgccgtctgtgatggtgcgttcttcaagaacaaggaagtcgttgtcatcggtggcggtgattcagcgattgaagaaggcctttatttaacacaattagctagcaaagtaaccgttattcaccgccgtgatcaactacgtgcgcaaaagattttacaagatcgcgcatttgctaacgataagatggcttttgtctggaatgcacaggttaaaacgattgaaggcgacgataaaaaagtagctgctgtcacttatgttgataaggaaagtggcgaaactaaagaagtcccagcaagtggtgtcttcatttacgtcggtattgatccaatgacaagtgctttcaaagacctaggtattttaacggaagccggttgggttaaaacagacgaccacatggcaactagtgtccccgggatttttgcaatcggtgatgttcgtgaaaaggacttacgtcaaatcacaacagcagtcggtgacggcggcatagccggccaagaagtcttcaaatatattcaaagtatttaaagaacgtttaaatgagctataccaatgaaagcgccggtccataaaaaatggatcggtgctttttttaagtttcataacacttgatgccctagggaaagcgtttgatatatgctataattatagtgagattttataacaaatgtgggggttacaaaatgagctggcaagataattatgcaatttggaataatcaaacaaaaatggatttacctttaagagaagctttagacaacatggcaaacgatgaagaagcgcttgaaaaagccttcagcgtgccaatggaattcgggacagctggtatgcgtggtctcttaggccctgggattaactgcatgaatatttatacagttcgtcaagcaacagaaggccttgcccaattcatggaaactttaccagaagcaactaaaaaacgtggggttgcgattagttttgattcacgttaccaatcagaaacttttgcacacgaagcagcacgcgttttaggccaacatcaaattccaacattcgtttttgatgctttgcgcccaacacctgaattatcatttacggtccgtcacctacatacttatgcaggaatcatgattaccgctagccacaatcctaagcaatacaacggctacaagatttacggcgaagatggcgctcaaatgccacctaaggaatctgatatgattacaagctatatccgtcaggtatcagacctatttgcaattgaagttgctgacgaaatggccttacgcgaagccggcatcatggctttaattggtgaaaatgttgatcaagcttatttagcagaagttaaaaaagtaacgatcaaccaagaattggtggatactgttggtaaaacaatgtcattaatttacacaccacttcatggtactgggaaagtccttggtgaacgtgctttacgtcaagcaggcttcgaacaattcacaatggtggccgaacaagccgttgctgatccagaatttgcaacaacaccattccctaacccagaattcccgcaaacttttgatatggctatcgaacttggaaaagcgcaaaaagcagaccttttaattgcgactgatccagatgccgatcgtcttggggccgctgtacgccaaccagatggtagctatcaattaatgacagggaaccaaatcgcatctgttttacttcgctatattttacaagcaagtaaagatgcaggaacattaccagcaaacgccgctgcagttaaatcaatcgtttcaacggaattggcaactaagattgctgctagttacaatgttaaaatgatcgatgtcttaacgggcttcaagtttatcgcagagcaaatccaacattttgaagatactaatgaaaataccttcatgtttggttttgaagaaagttacggctacttggttaaaccattcgtccgtgataaggatgccattcaaacgctggttctattagctgaagtggcagcttactacaaatcaaacggtaagacgttgtacgacggtattcaagaactatacgctgaatatggctactatgctgaacaaacgacagcgattgattttgaaggcgtcaacggcccacaacaaatggctgacttaatggttaagtgtcgtgaagaaagtcctgttgattttgccggcgtcaaagtcgcttcagcagaagacttccaaacacaaacgcaaacatttgctgatggtcacactgaaccaatcaatttaccaacatcaaacgttttgaaatatcacttagaagatggcacatggatcgcaattcgtccaagtggcacagaacctaaggttaaattctacgttgggacttgtgctgacgatgaagcaacggctgatttgaaattagctaactttgaaaaagcaattcaagaccttgttaaataacaaaatcctcataaaaagggttactattttacattgacgcaaaatttatctataataagtgcaacaaataggcggactatatcgttagtcggtctatttttgtaagaatggaggcttttttcgaatgggtatgcatcagtatttgcaagggttaaataatttggagacactaaaccgggcaccaggattatttaagtatcaggaacattccgtcgcagcgcattcatttaaagtttgcgagattgcgcagttactaggcgatatcgaagaagaaaacggccaaccaatcaattggcaagtcttatacgaacgggcgttgaaccatgattatacggagcgttttattggggacatcaaaacacccgttaaatatgcgacgcacgagttacggacgatgttagccaatgtcgaaagttctttaacggataacttcatcaataatgaaattcccggttttttacaagaacgctataaacggcgcttgagtgaaggtaaggatgaaactttggaaggccaattattggcagttgccgataagattgatttgctttatgaatcatttggcgagattgaaaaggggaatccagagaatgcctttttggaaatttttgcagaaagcttgaaaacgattatgcaatatcaaaatttgtcgagcgcacaatatttcatccgaaaaatgttgccagacctattgagtgaggattttgccgaccgtggcaagctcacacaattggtgcgccaaacgttgtcaaactaggctagttcactagtgtagcgaaaatacgttcggtatgttagaatggtaattgataaaaaagagggcatctgttcagtggcttaatcaccacgcgcagatgatcactgacaacttataaatgcgtcatttaagaaggtgtctggtacaaaaccccgttttgtatcaggcgcttcttttatcgcaataaaacggcactggaggcaattcatgattgatagacagaacgataacctatttgacttagtcgcaccatatgaacctgctggcgatcaacctgctgcaattgaaaccttaacgaagaattttgaggcaggtgctaaggcgcaggtcttgatgggcgctactgggaccgggaaaacttttacaatgtccaacgtgattaagaatctcaacaaaccaacgttgattatttcgcataataagacattggccggtcaactgtacgcggaatttaagcagtttttccctaacaatgcggttgaatatttcgtgagttattatgattactaccaaccagaagcctatgtgccttccagtgatacgtatatcgaaaaagattcgagtattaatgatgaaatcgataaactacggcattcagcgacgagttcgttattagaacgcaacgatgtgattgttgtggcctctgtttcttgtatctttgggttaggggatccacgtgaataccaaaatcacgtcttgtcactgcgtccaggaatggaagttgaacgtaacgacctattacgtcagttagttgatattcaatttgaacgtaacgatatagattttcaacgggggcgctttagagtgcgcggtgatgtggttgaaattttcccagcttctcgtgatgatcatgcgctgcgcgttgaattttttggtgatgaaattgatcggattgttgaagtggatgccttaacgggtgaagtgattggcgaacggtcgcacgttgccattttccccgcaacgcattttatgacgaatgatgaaaaaatggaaaaagccattgaaagtattaaagctgaattggctgaacggctagctgttttaaagggcgagggtaagttactagaagcgcaacgccttgaacaacgaacaaactatgaccttgaaatgatgcaagaaatgggttattgttctgggattgaaaattactcacgccatatggaagatcgccaagccggcgaaccgccttacacgttgctagatttcttcccaaaggattcaatcatgatgattgatgaatcccatgttactatgccccaaattcgggggatgtacaacggtgatcgtgcgcggaaacaaatgttgattgactatggtttccggttaccaagtgcgttagataaccgcccattaacgttgccagaattcgaagagcacgtgaatgaaattatgtatgtgtcggccacaccagggccttacgaagcggaacaaaccgatattcaagtggatcagattattcgaccaaccggcctgttggatcccaatattgaagtccgaccaattatgggccagattgacgatttagtcggtgagatcaatgaccgcatcgaaaagaatgaacgggtcttcattacaactttaaccaagaagatgtcggaagatttaaccgattatctcaaggaactgggaatcaaagtccggtacttgcacagtgatatcaagacgttggaacgaacggaaattatccgtgatttacgactgggcaagttcgatgtcttaattgggattaacttattacgggaaggaatcgatgtgcctgaagtatccttagtggcgattttagacgcagataaggaaggcttcttacgtagcgaacgttccttaatccaaaccattggccgggcatctcgtaatgaaaatgggcaagtcttgttgtacgccgataagattacggattcaatgcgtcacgcaattgatgaaactaaacggcgacggacaattcaagaagactacaatacagctcataacatcacaccgaaaacgattattaaaccaattagagatgcgatttcaatggttcaatcagttgaacatccagaagaaattaagatgaccaatgagattgatctagagaacatgtcgaaggctgaaaaactagaaatggttgaacgactatccgaacagatgcgcttagcagctaagaaacttgatttcgaacaagcggcgacattgcgggataccattttagaattaaaaagtgaaatagattagaggtcaagtatggcaaatgataagatagtaattcacggcgcacgcgcccataatttaaaggatatcgatgttacgattccaagagataagttagtggtcatcaccgggttatctggttctgggaagagctctttagcatttgatacgttatatgcagaaggacaacggcgctatgttgagagtttatcagcatacgcgcgtcagttcttagggcaaatggataagccggatgttgattcaattgacgggttaagtccagcgatttcgattgaccaaaagacgacctctaaaaacccacgttcaacagttgggacagtcactgaaatcaatgactacctccgcttattgtgggcccgagttggtcaacccatctgtccaaatgatggtactgaaatcagtagccaatccgtagaacaaatggttgatcgggtattggctttaccagaacggactaaactccaaattatgtcaccgattgttcgtggtaaaaaagggcaacacaaaaaaatcttcgagaagattcagcgtgaaggctacgttcgtgtccaagtggatggcgaagtaatggatgttagcacggatttagaattagataagaataagaaacatgatatcaatattgttgttgatcgaatcgtcgttaaagacggtgttcggtcacggttatttgattcgtttgaagcagctttgagactatctgacggttatgcgacagctgatgtgattgacggcgaacaactcttgttctctgaacattatgcttgtccaatctgtggctttacggttggggcattagaaccacggctgttctcatttaatgcaccatttggggcttgtcctgaatgtgatggcctaggtttaaaactagaagttgatacggacctcgttgtcccagatacaagtaaaacattgcgtgaaggggcgattgcgccttggaatccaatcagttcgcaatattacccacaaatgttagaacaagcttgcacggcctttaaaatcgatatggaccgtcctttcagtaagttgacacctcgccaaaaagatatcatcttaaacggctcacaaggcaaagaattccacttccattatgaaaatgattttggtggcgttcgcgatgttgaagtgccttttgaaggggtcctcagcaatattgaccgtcgttatcgtgaaacgaatagtgatttcacacggacgcagatgcggacctatatgacggaattaacgtgtcaaacgtgtcacggtaagcgactaaatcgtcaagccttggcagttaaagtcggtggacaagatatcgccgaagtttcagacaatgcaatcaaggatggcctcccattctttgacaatcttgaactttctgaaaaagatcaagtgattgcgaaacccattttgaaagaagttcatgatcgcctgactttcttgattaacgtcggcttagactacttaacgttgagtcggtcagctgggacactttccggtggggaagcacaacggattcgtttggccacacaaattgggtcgaacttatctggcgtgctttatatcttagacgaaccttcaatcgggttgcatcaacgtgataatgaccgtttaatcggttctttgaagaagatgcgcgatttagggaatactttaatcgtggttgaacatgatgaagatacgatgcgagcagccgattacctgatcgatattggcccaggtgctggggatcttggtgggaaagtgatggccgctggcacaccaacggaagttgaacagaatcccaattccttaacgggtcgttatttagcggggcaggattatattccggtaccgttaaaacgacgtcaagggaatggcaaaaaagtgcgcgtaactggcgctgccgaaaataatttaaaagatttaacggttgattttccattaggtgaatttatcgccgtgactggtgtttctggttctggtaaatcaacattagtgaatacgattttgaaaaaggcccttgcgcaaaagatgaatcgtaattcagctaaaccgggtcaatataagaccatcacgggttatcaaaaccttgagaagttgattaatatcgaccaaagtccaattggccgcacaccacggagtaacccagcaacttataccggtgtcttcgacaatgtccgagatttattcgcacaaaccaatgaagcaaagttacggggttacaagaagggccgctttagttttaatgtgaagggcggtcgctgtgaagcctgcaagggtgacgggattatcaagattgaaatgaatttcttaccggatgtctatgtcccttgtgaaatttgtcatggtagtcgttataattcagaaacgttagaggtggtttacaaaggtaagaacattgctgaaatcttggatatgaccgtttctgaagcaactgaattcttcgaaaacattcctaagattgctcgtaaactacaaacaattgtcgatgttggtttaggttatgtgacattaggccaatcagcaacaaccttatctggtggggaagcccaacggatgaaattggcttctgaattgcaaaaacaatcaacgggtaagaatttgtatatcttagacgaaccaacaacaggtttgcatacggatgatattaaacgattgttaggggtcttagaacggttagttgatgagggcaacactgttttagtcattgagcataaccttgacgtgattaaaacggctgatcatatcattgatttaggaccagaaggtggcgacaaaggtggtacgatcgttgcgaccggcacacctgaaacattggtgaacgtcgcagaaagctacacgggacgttatttgaaaccaattttagaacgtgatacagcgcgcacactagcggcacaagaatgagtattgggctgaggtcaatgttgatctcagcttttttgatgggcttcttttttatgaaagttattgagcattggtcccaaaaaaagtatgatagatttattagataggaagaggtggtaagatgtttagaagaaatgattggcgatttgattggtcagaattaatgaccgggattattttcctaattggggcgtacttcttgttaaataagccgaaagcaacattatctggcttagtcatcattgtggcggtggctgcgattattcggggaattgctaaaattagtgtttacggacaattaagacaagatactggtattcgggcgaccgtgatgttggtcaatgctattttagatattgtcatcgggttattattcatctttaatatcccagccggcatttttacaatgagttatatgtttgcaatttggttcttgctagatgcaatcgtcgggttattaaatgtaagtcatttgaagcaatttaacatgggcttgtatattctatcgattatcttaaacgttttaggattgatcgtgggcttattattattaatgaatccagtggtggcagctgtgacgatgactaccttattaggtttttacttcgtgattgttggaatcaacgcgattgttatcgcgattgcgcgtcggttataaaatgaaaagtctagaacaacattcagttgttttagacttttttaatgtttatagtcatgtttactttcaatgacacaccaggcatgctacaatggaataaccgataattcgaggagtggggactaatgacagatacgttgaatttagtagtaattactgggatgagtggtgcgggtaaaaccgtcgcaatgcagagttttgaagatttaggttatttctgtgttgataacatgccaccttcattgttacccaaattttgggaattagtgaaggaatccggtaaggtaacgaagatcgcgttagtgatcgatttacgttcacgcgccttttacgatgggattattgagatgctttctggtcttgataatacgcaatttgtcacaactaagattttattcttagatgcttctgatgaagaacttgtttcccgttacaaagaaacgcgtcgttcgcacccacttgcgcgcaatggccgtttgatggatgggattcacaaggaacgtgaattattaactgaaattagaaaccaatctcaaatggtggttaatacatcaatgttatcacctcgcgaattacgggaacagattttccgggtctttaagacctctgataatccgtcatttcatatcgaagtgatgtcatttgggtttaaatatggcttgccaattgatgctgatattgtgatggatgtgcgctttttgcctaatccatactatgttgcggaattcaaagcgttaaacgggttggataaaccagtccgagattacgttatggaacaacctgcaacagaaaaattttatcaacaattgacagcactattgaaaagtatcatgccaggttatcttaaagaaggtaaaacaagtgttacgattgcaatcggctgtaccggtggacaacatcgctcagttgcattagcacaacgtttagcggatgatttagccgttgactatccagttgatgtgacgcatcgtgatatgaagaaacgaaaggaatcggtgaaccgctcatgacagctactaatcgcattatccgggtgattaaaggtcgtcgtcccaaggtggttgtgattggtggtgggacgggactccccgttattctaaaaagtttacgtgaacaaaatgcggatgcgaccgccattgtaacggtcgcagacgatggtggttcatctggtgttatcagagattatattaacgttgtgccacctggtgatattcggaacgttttggtggctttatcagatttaccacagttaacgctcgatatttttcaatatagatttaaatcacatgatgccttcttttcagggcatgcaattggtaatttaatcattgcggcgctttctgaaatggaatctggcatctttgatgcggttcaacgactttcagaaatgatggctgttgatgggcatgtttacccggccgctaatgtggccttaacgttaaatgcggcctttcaagatgggacacaactggcaggtgaatctgaaattaccgcagcgcgcaagcaaattaagcgcgtttgggtgacgaagacggatcctaatgatcaagaggaaccaaccgcagttcaagaagttgtcgaagcgattatggcagccgatgttgtggtccttggaccaggaagtttgtttaccagcattttaccgaatttaatgattaaaaatcttggtgaggcagttaagcaaaccaaagccgagattatttatatttgtaatattatgactcaaaaaggtgagacagaacgcttcactgatgctgaccatgtccgggttttgaatgaacatctagggcaacatgtggtggatacggtccttgtcaatactggccaagtgccagctaattatttggatcatcaaaaatatgatgaaattttatggccggtcgaacatgattttgacgggctgagacaactaggttgccgagtgatttccgataattttttaaaactcgacaatcacggtgtcttccataatggtcaaaaggtcgcaagtgaaattatgaatcttgcctttcaggttaatacaactaagcgaggtgaataaggatggcttcatacgcaagtgaagtaaaaaaagagctaacgcaactcgaagtacatccagaacatgcacgtgctgaattggccgctttaatcagaatgaatggttcattaagcttgatgaaccatcaatttgttttgaacgtgcagacagaaaatccggcgatcgctcgccggatttatagtttattgaagcaaaactatcaggttgaatcagagttattggttcgccgtaaaatgaaattaaagaaaaataatcaatatattgtgcgactcaaatatgatacaaacacggttttaaacgacttaaacatcgttgctgaagatgggtttaccattcatacacgagtgtcagaagatatcattgatgaagatcagcgcgtacgttcatatctaagaggcgcctttttagctggtggttcggttaataatccggaaaccagtcggtatcacttagagatttattcactctacgaagaacacaatcaagatattgtgcggatgatgaatagatttgggctaaacgctaaaacaacggttcgccgcagtggttatattacttatttgaaagaagcggaaaaaattgctgatttcttacaggtgattggtgccacgaatgcgatgttgaagtttgaagacattcgaattgtacgcgacatgcgtaattcagtgaaccggttagttaactgtgaaacagccaatttaaataaaacgattgatgcggctgctaaacagattgaaaatatcgagtatttaagggattcagtaggactagataatttacccgcgaagctgcgggaaattgcattattacggttggaatttccggacattactttgaaagaacttggtgaaaagatgccgagtggggcaatctcaaaatcagggattaaccatcgtttaagaaaattaaatcaattggctgaaggttaccaacaaaaagtcatttagaagaaatactcgttaataagtgcacaagcgttgactttcgcaattaaattgtgtacactataaactaacgggtttccggggaggaaaacatatgattaaaccagtattattagatgagcaattatgcttttcgatttatcgcgcacagaaagcttacaaccatttttacggaaaggtcttgaaaccttatggcttaacttatccacaattcattgcaatgttagcattgtgggaacatgggacaatgtcagttaaggaattaggtcaccatttagaattagatagtgggacattaacaccactattgaaacgcttagaagcggatggttgggttgatcgtaagcgcgcatctgacgatgaacgtcgcgttgatgtttcattaacagatcaagcagaatcacaaaaacttgaaatctacgaacgtgtcggtaactgtaccaactacctagatttcacaagcgacaaatatcatgacttacgtcaaagcatgaatgaagtcgaaaaacatttaaatgccattcaatcagacactgatcgatttgcttaaagcaaatcatgatgagtgcaaaaattaagcgatcgaagttcttgttttaaagaactttgatcgcttttttatattaaaaagcgcgcccttgaacaaatcaaaggcgcgctttacctatttagcttgtaaaatcctatcgagttcttctggtgttattgattcatcaaaaatgtgttcaccagcgatgattgttgggacgaatttgatattggcggcttgagcttcgtcaacaatggcagctaactgcacggtattatcaagtgggcttagtttaaggttagcctgcatgtatttatcgaattcagaatccgataaatcagggcgccacgttttttgatgagtgtagagaaaatggatggcgtttaaagcaacagcgggttgatcgaagggtaggtaagtatgggcgaggttaccgattaatagatcatctttatccttgttatatggtttgatgattcgtcgtactttaccggcttcgacggccttagtgagctgttcctctgatttgaggaaccatttgcgacaatagggacaagctaaattcaaaaattcaacaagtgtgacgggtgcttcaggatggccaatgacaatgccaccttcagttgttacttgatcacttttaataacactaatatccataataaaacctcctctgtattaaactaagtatagcaaatacgtagcaaaaaaggacatcacaaggtttaaacttgaggtgtcctgtttgaagtaatgtccggaatgaaaacgtgcttcctcaaactgtcttttccggttaaacaaaaaatggcaatcatggttgaaaaacaccataattgccattttttgttaatcctcaaagtcaaagcgtttgagtcagcactctattttggttggttaaccataatgtcgtcaatcaaaccgtaatcttttgcttcttgggctgtcatgtagttatcacgatcagtgtctgcttgtaatttttcgaagctttgaccagaattatctgccaagatttggttcaaacgtttccgagtcttcaaaatttcgcgagctgcgatttcaatttcagtttgttgaccttgtgcaccacctaaaggttggtgaatcaagactgttgagttaggcaatgcaaaacgtttgccttttgtcccagctgaaagtaaaacgctggccattgaagcagccatgcccatagcgattgtttgaacatcagatttaatgaagttcattgtatccatgattgccaaaccggctgtcacagaaccaccaggtgagttgatgtagattgaaatatccttatctgaatcttgcgcatccaagaatagtaattgcgcaatgattgtgttagccatttggtcgtttacttcaccagataacatgatgatccggtcttttagtaaacgagagtaaatatcgtaggcgcgttcgccacgagatgtttgttcgataactgtcggtactaacattgaattgcctccttatataaagctgagaagatgggcttaaccaaagtaattggtcaatcttcccaataatctataaaccaaattttacagcaaaggtcaactatggtcaaatggtaagtcctaaatactgattaattatgtagggtgcaatttaatccagaatatgttatactatttattagttaatcagcacgtatcactgtagtatcaagtattgtttgaagactttaatcaactggagtaaccctggagttacaagtagtgtaaagaggcggcttacgctgtttaaacgagaaaatatttagaaacacaagaattgagacataattgcattaacccaaaaataaaaccggcatatgaacatgccttaaccgctagtgatttagtactagcgagcggcgccaattagtgactggcgccccgacattatgtcagaatttaatatgcgaaattaattagaaggccacctagaaataggtggccttcgtcaattctattagaaaacgcctgatatcaattaaccgatatcaggcgttttctaatttaagcatcatattccgccaagtcatagtcttggattgcctttttaattttagttgcgtagttaggatcagtggcataaccagctttttgtaagaggtcggcttgttccgcataattagtgaggttggtgagtgtcgcgtaagtgccaacactcagaaaattactgtgatcttgaattgcgatttcaagagaagggtaaactttgaagtaatctttaatcgttgttcgttgattattttcgtattcgtcggtgttcattaggatttgctgcccttggtattgtcccttaacaccaaaaaggttattggccttggttgctaaatcgctgcgcccccagtcagattcgataatggcttgcgcgataacaatactaggtaaaacctgatgctttttttgatagaccaatttagcattttgaccgatttttttaatgaagcgactttgccgttgttgttcttcttggttagtttcccaggttcgagcgggtgcttgactgctttgatgtaggccacagccagtcagtagcactaataggccactgaaaactagtccgatccgtattttagacgtgattgttgccaatgaattgcctcccaattgatagtaaagttcagcttaacaaataatacggtaaaagaatcaaaatacccccgaattttagtgtgatttagttaactttaaacaaatttaagaataatcggttggattacagtttagaatttacgttgttcgcgcaatgcggtacactaaagttagtaccaaaaaagcgttcacaaagtttaggaggagttgtaaaatgacacacaaaatgattttagatttagatactgggattgatgatgctttggcgattgcctatgcattgggttcaccagaagttgaattaattggcattacctcagaatatggcaatgttttgacggaaagaagtgtcgtcaatagtcaacaaatcttacatttattgggccatccagaaatcccagtttatttaggggctggtcattctacgacgactaacgactttagcgtgttaccaattagtgcggaaatccacgggcaagatggggtcggcgaaatccatttaacacaaccgcatgcggatgccgctagtcaatcagctgttgattttatattagctgcttgtcaacagtatggggctgatctcagcattgtcgcgactggtccaatgacgaatttagcattagcaattcaaaaggatttaccaacgcttcaaaaagtgggacaaattgtcatcatgggtggcgcgctcacagtttgtgggaatgtttcgccatatgcggaagctaatattagtcaagatccagaagcagctgatttacttttcaagagtgggttaccagtcacgatggtcggcttagatgtgacactcagaacactcttcactaagacggatacccaggaatggcgggaacttgcaacggatgcggccaaagcctatgctgatatggttgattattatattaaggcgtatgaagtaacatcacctcatttacatggttgtgccctacatgatccattagcagttgcagtggcaattgattcaagccttgtgacaaccttcccattgaatctgaaaacagaggtcgaagggccttcacgtggtcggacaattggggacaatgcccgtttggacgatccaaaaacgagaacagctgtctgtgtgcaagttgatacaccacgctttttagctgagttcaaaacacggattgggcaactcttaaaagtagcaaaataattaacaagcaaaaaaatagtattattaaaatgaaggtcgtatattagcgttaaagtaagcacctatggctatatagtcatgggggcttttttgtgttattttttataactaataattaccataagcataaaatcaccttttgtattttgtgaatgttaagttgaaactatacgaaaggagtgttgccaaatgaaaaaggttagtcataagaaattgcttaggcggacattatatgtctgtagtggcacgttgttattactgaatagtggtgttggggtggcgagtgtctttgtcatcaatcaaaatcgggcgcaagcgagtcaggtgaatccacgggccggcttagctgatatttcgattttgcaaaatgcgagtttgacctcgacaacggggacacaaatgacccctaatgcacagggaaactttgatctatcgttaaattatacggggcaaggtgttgcaacagtgggtgttgcggataaaaaggttttggtttacgccttacccgcttcgcttcagggtaaagtcgttggtggtagtacagttgatattcaagctgatcttttaccaatcacacctggcgatgtcccaggtgttaaaacgttatttgatgcattaggtttaacaattactgctttggataaggctttaaaaattccagcagttgttgcggccttcaatgatcttaagaaagttcaagatttaggtagttatcaagaaacggttactgctaacgtctctcctgatggtaaaacaatttcggtcgactttacgcaaggttttggtcgttatgtgcatcaagcctatgcggcattatttaatactttgcgggatgcaatcgcagccgttcattcggacaatatacttatcgagactttagtgaaagcgcttcaaaaagcaagtgcagatctttttgcaattattgatgccattgccgggggcacgtcgacaattttagatagtgctttgagtggtaatttattaggttcggctagcggtactttgcataccacagttagtgatccgggtgtaccaactgatacggttaaagcagctgcgattaataatgccttaatttcagcagacattttgacggccgttgagcaagaaggggaagcagtaacgttgaattttccaacgactgcgactaatccgattgaaaattatgatgtggcaacaccaacggtaacccaaccagtggctgggcaaacaacagtcgctgggaacgtcattttaaaagaaccaattccagatgtcacaagttttgaagcgacagttaccttagctgacggcacgcaaaaaacagccgcggttgatgaaaatggtaactttaacgtgccaatcgacgcagttaaagcaggtgacaaattaacagtcgaaataatcgcacataacggcgatcacgaaaagggtagcgataaggttaatgtgaccgttgaagccggcaatccaggcgagacgaacccactagaaaactatgtggttgctaaaccaagtgttgacccagtcaaagctggtgatacgaaagtgactggtaaagtcactatcaataagccattccctgaaggtacaacgtttgaagcaagcgtgacaatgcctgatggttccgttaaatacggtatggttgatatcaacggcaatttcatcgttaaaacagggcaattaaaagccggtcaaagattgatcgtcacgattattgcgcataatggtgactttgaaaaagatggtcaaccagttacagttcgagtagccgataataaccaggatggctctggcaacggcaatggcggaactggtaacggtggcaacacgaatggtaattcaaacggtagtcataatccgggcaacaataatgccggtaatggtggccaaacgaataatggtggtaatgggcaactagggaattcaaacaacgtcaataatttgacgaataacggatcgaatagtggtcaaaataaccatcatatgttaaatgtgggtgttagtgacacaactggtagtcaaaatgctaacagtaaagctggcgatttaccacaaacagacgccaataagactggtgtctgggcagcggttggggcattcttaatcgcaatggtggcactatttaagagcttattaccaatcaaacgtgataaataataagttatctgaataacgccacaaaaaaagggtgatcataatgatcaccctttttgtattttcttggaaggaaaatcgagctagcggggattgaacccgcattgatcatcatttagtgtctctaacttgatttttcttgggaggaatttcaagtgatgatcagttctaccgattaaactataactcattggtggagcgaattagacgattactttagggaggaatgtctaatgaaattcatgtttgtcagatgattcttgggaggaatttatctgatgtataaagaataccaattgaatgtgaatgaattgtgaaaattcacggatgaaactaagtagaatttgatactttcatatgacggccttcgatgcgccatattggtggagcgaattagacgattactttagggaggaatgtctaatgaaattcacgttcgtcagatgattcttgggaggaatttatctgatgtataaagaataccaattgaatgtgaacgaaatatgaagattcacagatgaaattaagacgaattgacggcttttatgcgaaagcaaaaatgcgaggtaaaaagtcgctgagtagcggccctttacctcgcatctttggttggccagctattgggagatagcgaccttgcaattgaagttcttgggaggaatttcaattgattgcttattattaggatggttctgggagaaaaccgacatagggaggtatgtcgattcgggttaatcagatgattcttgggaggcgttcatctgatataaatagaataacaattaaatatgaacaaagtatgaatatttaattgcgattgttagataaatatgactatctttttgtaagtgcttttatttgtaaaaaaggttagcagtcgctacactttagatagtgataaatttaggaggcgttttaaatggaaaaggtattaatattaggggcgcatggcaagattgcacaattgacacgagcacaattgctagctaaaacggatgcgcaattattgttatttctaagaaaagcgaaccgactaacgatccaagatcaacaacgcgaacagttggttgaaggcgatgctagccagcaagctgatttagtccaagcaatgaagggtgtcacagtcgtctacgcaaatttagcgggcgctaatattgaagcacaggctaaagccgttgtatctgctatgaaagcagcgggggttaaacgcttaatttggatctcaacactcggcatctatgacgaagttcccggggcatacggtcagtggaaccatcaaatgttagatgatggttatttgccaacatacgcagccgccgccaaagtaattgaaacgtcagggttagcctttacaattattcgcccagcttggttatctgataaggacgaaatcgattatgaaatcacacaccgcacggatactttcaagggtaccgaagtttccagaaaaagcgtcgctgcagaagttgtccgtttgattcaaaacccaactgaagcagttggtgattcattgggcttaaataaacccaatacggatggtgacaaaccagaatggtaccgctaaaaaaagaaggtcatagcgaccttcttttttgtgttggattttcttttgactgcggttaaggtatgatagaccaatcataatcaaattgaggtggctttaatgaacgaaccacaaaatcattatacaaatggcgtactaatgaccttagcggtgatgggcacaaaatggaaaccattaattttatgtcatttagtggatggtccccagagacccgctgacttaaaaagagcggttcaaggaatctcatcaaaagtgctgacggatcagctacgagaactagagcgcgatgggattattacgcggaccatttttaatgaagtaccaccacatgttgagtatgccatttctgaatatggacaatcattggtgcccattctaggcgtgatggccaactggggtgaagcccgaatcgattttctaaagcaaagcggtgtagcagtcgatttgacttacacagatcatgaaaaatatgagctttaatgaaaagacaagctggtaaaatttttttgaaattgtcttgattaatttaagctgtcataccacaaaacttactttaaagtgccttagttagtcgaaagtgcgtaattgtttattctgataagccgcctatactaaccttatcaactaaaagtgagggataaaaatgacaattaaaaataaagtcgtcgtgattaccggcgcgtcaagtgggattggtaaagaaacagctacgttattagcagctaagggggccaagttggtcttagcggcccgtcgtgaaagtatgttagcaccattggctgcatcgttgactgctaaatacgatacggagattatctatcaaaaaacagatgtgacgcaattagcagatgtaaaagccttgatcgattctgcaatcactaaatttgggcgcatcgatgtgttgtttaacaatgccgggttaatgcctgtttcaatgttacgtgacggtaaagtcgatgagtgggaagcaatgattgatattaatctgaagggtgccttatacggcattaaatacgcactaccaatcatggaacaacaaaagagtggtcatattatcacaactgattcggttgcgggccattttacaggtgaaggttcgtctgtttattcagtcactaaatatgcgatgcgggctgtgatggaaggcttacgagttgaagaagttggtaaaggtatcaaatcaacactaatttcaccagggcatgcgcaaactgaattggccgctaaaattagtgatccgaaattaagagaagcggttcacaagagtgaatcagaaactggattgagtgccaatgatgtggctaacgccgtggtttatgtaattgatacaccagctaacgtgggaatcaatgaagttatcttacgatcgattgatcaaagagattattagtcaaaaaaagccgtgctaatgcacggcttttttactgttctttaagataggtaaacatggtaccgataatttctttagcattagaatctgtgtaaactgatagtttaaggtcaatttcgtccaagccttcaagtaatgcttgttgctttttaacgaccgctgctctatgattcagcagaagcgtcttgcgggcttcaattgattctggcccaatcatgcagtagtcaatatattgcttgatgtcagcaattttcatctgtgtattttttaagcaacagattgtatggatgagagacatgtcggcatcggtaaaggctcggtagccgctactatctcttttgacaaagggtaatagaccttgtttatcataatagcgaatcgtatagattgagaggccggttatttgagaaacttgtttaattgagtatgtcataatattttttcaattctttcttgcactagagtatggtctattgtttatactgtaaagaaatcaaaggagatagtcaattatgaaaactgcattagtaacgggttcggataaaggattaggatttgaattggtcaagaatttaagccaaaacggttggcaagtgattttaggcgtccgcaatttagagcgtggcaaccaggcaattagtcagttaacatcattaggactaactaatctgagcctcgtgcaactcgatttaatggacgaggttagtattaaagcagctgctgttgaaattgagcaaaaccatacacaactatcattactaattaacaatgcgggtattcccggcaaggaatacgtgggttatgaaacgccgattgaggatctaaaagccacgatgcaagtcaacttctttggcacctatctactgattaaccaattaacgggattgctgcatcaaaatcaaggcacaatcgtcaatattacggtgccaactaatgccaatcatctttggaacccactcgcctataaaacaagtaagggcgctcaaaatgtgatgacgacttcgttggggatttcgtttgaacaacaagcgcaaaacatattaatttatgcgattcatccaggcattatgtcgacggacttaaataataacgtcacgggacctttcgtgcattctgccgaagtggttggcaaaaaaattattcaaacgattttaaataaaaaacaccggtcgggcgactttgttgaaatctatcatcagattccagataatgcgttagttcgcatgttagcaaagcggtttgggccacaagattagggatacttcctgattaaaaaaagattgtattctaaatcgaagatatctataatgaagcctattctgttagaagaggttacaaaatgtcattgattggaattttaattgttatttatttttgctatagccagtttaaagcagaacggccaagacgtttccgctatcttttactaccactctacgcgttattgatgtttgtcacgacttttaagctgaacgctacaaacctgttgttggctaccgttattatattattgggaattgcgattggcacttttcaaggtcggtttgcgcaactgtctttagaaaatgttcaaggtcaaacgaaagttagcattagaggtggttggccgtttctattaggctggggattaatcttgggaattcaaattttgttaagtatttttttagcgcaccaccaaatggatgcagcagagctctcccaagaagttttgcacagtgcgctagaagaattattaccatttagaagaatttacgcctttgactggtggattctatgggccttgtcgggaagtagtagtttagcctataccgggatgttggcttatcgatcaccagatttttggcaggcaattcgacgaagatcacatcgaaaaagttagaaaaccaactaaattaaatttaatattacgcaatagtatgtaagttattaatttatagaacgacatagtctaagttaggactatgtcgtttttttatattagtattcttatttttaaaatgatgactacctttgtatagtaaagaggttcaatgatataaaaggagagcttacaatgaaagcaataatgcaaaatgatttttcggggatagctggccttgcaatgacaacgatggctgatcctaaagtatcagcgttatctgtaattgttcgaaatcagtttataccagttttaccttatgattggttgaccggtgagggtgctttaaaagcgatacgaccggttaaattaccaatggttatcgggtatggctttggcggcattgttgaacaggttggtcgcttacgtaatcagaaattagtgggacgcgcagtgattggtattcaacctaacggtgctgccaaaacaataatcaattcgcaagtaccaccgttattattcaaggtgccacaaaatgtcactttacaagcggctacgacattaattggcggtggcgatgcggcactacacgcggtgcaaaaaagttggattaacaaaaacgacattgttttggttaccggtgcttcaggaggtgtgggaacctatttagtgcagctgttgaaattggcaggggcaacagtgattgcgttagccagttctaataatctcgcctttgttaggacgctaggtgccgattatgtcttgaattatcagactgatttacgccaacaattgcgaaatgttccgcagcctaataaggtgatcgatacggttggtcaacaagatttattaactttaattagtcagcagtatgagacattagccattctatccttatcaatcccattttttcgtcctatgaaaataaaccagcactttgaatttagcaatggttcagtcggtattaatggttatcaacaactattggcaatgcttgccaatcatcaattgcgcgctcatattcaggctgaatataattttgaggatattaaaaaagcccattttgattcgaaaaatgggcattcacagggacggattttattaaagttttaaaatgaatgggttgtgatatcaaaaattgtagcgagagtctcgcttttttgataagcaacttcagctgttgaaggttgactcaattgttcggcagctttagcacagactagaaagagatccgctagcatgtaatgtgattgatgtacagttgtccaatcgatgccttcatttgcaattaacaatgcagttgcatattcagcatgttcgaataggcttagactatataaatagtagaaactgttgatattttcatcaaaagataagaggcggttagtttttagaatgacacgtaattgctcgaatttggttgtgtcgattatttgtgtttcacgctgttcaatataagcgattgccgctagaataaggccttcggtagatgtccacaagctcgctttagaatgactagtttcagctaaagcgagtttcaggtaccgtaagctattagcgacaggttgctgtgtttggaaaagcgccacaccataatagtaataataggtttgtaaatcaacttggcgatgtaattgttgaactagtgaatcatcatctaaataggtaagtatttttgtgtattgatgttggttacagagcgcttgaatggtgggtgcaaactctggcaggctatcaatgactaagtaatcatgaagaagatcgttagtgattgaaagatgtagacgttggcaaatttttgctaggagaatagcattggggatgtaggtgcctttttcgatttggctaatcatcggctgtgaacaaatatcagcggccaactgtttttgagagaggtgttgtgcacgtctttcgagtgcaattcgctgccccaatgcagttacgatagttgtatctgatatcaagtttaagcccctttcaaaatgttatttgcttaaatttaacatgccccaaattaaaataaaagggaggaattaaaatgccagtgttattagtcatattatttatgatgcttattttcaaagcgacgttgaccaaagccgctgtcactgtgttaggaatgttacttggggtttggttagtacggatagtgttaattggattagtattgcttttaattaaaatagttgtacgaaagactcaaaaaaagcgagatgcctaagcatcccgcttttattttggattagagttggtaatctgggtcgataattaagacgggtttgattgtttcgcccttaattgatgcttcattagcaagattaatatcttcgaagtcataaaatttttcagttttatcaaatgggaacatcccttgacggtaaaattcaattaaacgaggaatgtcgatttgtgggattgaatcgcccatattaatgccaacgactgatttatcgttaacgcataaatcgttccaagtatcgagatcaatgtggttaggagtaacagcaattgttgctgaaacaccaccttggcaaagggctttgattgagtcttccatgactggtgtaatcccagtggtgtcgacacagaagttcacaccacggccgttagtgagcgcttgaatagctgcgacaacatcgtctgtttgacggctgttaatggtatcagtggcgccaagttctttagcgagtgccaagcgttcgtcgataatgtcgactgcgatgactttggtacagccagaaattttaccggccatcattgcggctaaaccaacggcccctgtaccgaagacggcgattgtatcaccaggttttggttttaaagtatttaaaacagtaccactaccagtgacgtagccacaaccaagaggtccgagttcacgtaaatctaaatcatcaggcactttaacggcatttctttcacgaacgacagtcgttgtggtgaatgatgattgatcaaacatatcagcaacatggtgttcgttttcagtaaagtgagaactaccgtctggacgtacaccagaaaggttattttcagcataatttaaacattgggttggtacccctttaagacagttttcacaaataccacaagcataaaatgacagaacgacatgatcgccaacttttaagctttggacgtttgagccaactttttcaacaatcccggaaccttcatgaccaagcacaattggataaccaataattgcatcacctttacggagtgcttcatcagaatgacaaatgccacttgcgaccatgtggacttgaacatcatctggatggagtggggctaattcaatattatctttaatgacaaatggtgcaccttgttgttcaacgactgctgctttaattttcatgagaataccctcttatttaaatatttaattcacaaataattataacatttttgaaatcgtttacaatatcaaattaaggctatcaattaaaaagacggaataactgaaccctaaagccatccgtgttgttcacggtcccaatctttttttaaagtgccgctgacatagggattaccggtaataaaataacgataagggagttggccactggccgcttcagtattaacgccgatgcggggagccgttgtaatgtgacgtgggtgttgccgatttgcaagatcaattgttaacggtgcggtgtccacatttttaaaagtcagttgtttatcatgaattcctaaggcgcccattaatttgccggggccattagtgaggttaacaccaggtttgttcggccgattgcgttgcatctgcgccaaaccgtgagtgggttcgatggcccgaatcaaaacgccttgtggttgatccacagcttgcgtcacaatatcaaataggaagaaaccgcgtaattggtagatataaatcgtgccgggttcgtgataaaggggttcactaaatggcgttcgtcgaccgttataagcgtgtgccgcagtatcttgagcacccacataggcttcggtttcaacgattaaaccaccgagggtcccttggtggctcgtgtataacaggtgagtacccagtaaatcacgggcaatctcggttgtgggacgattggtaaaaaaagacattggtgctgattgtatgcttgtcatcttaaaacctccaaacaaatttattttaacacggtgctgcgaagatgtgacatttgtcatatcaaaatcatgacaaatgggtctaagcgtgcgggagagatttcgctatacttggtttattcaaacgaggtgactaagatgattgatattcaacaattaaaaatgcaattcgattcccaagttgttttagcaggacttgatttaactgttcaaccgggtgaaattatcggcttggtcggtgctaatggggccggcaaatcaacgttaattaacctaatgctggggcgattaacaccgacgcaaggtcagattcgtattttgggcgaacaaccaaatgaaaaacaccactttaatcaagtcggcgccatgacccaaggggatgtgccgctagcacgtttaaaagtaatcgaagaactggcattagtgcgcagttattatcaaacaccactaccgattgaaacgttgttaacacttgcggacttaacggaacacgcccaaaaattagtgtcccagttgtcaggtggtcaattacgacgtttatcatttgccctcgctatggcgggcaatccacaacttctctttttagatgagccgacggttggcatggatgtcggtagtcggcagaaattttggcagcagattgattgtttgaaaaaacaagggaaaacgattattttaacgtcccattatttagaggaaattgagcacattgcgacccggattttaattcttaaggcgggcgaatttcaatacgatggggactttgccacgttacaacgccaattcaaggatgcgcaagttagctttacgacgaccgaacctctagataggtttacacagtggtcggctgttaccagtgcaagtcaagatggcgcaaaagtgacattacaagttagtgatagtgatcaggtattagcacagttggcgccgttactaaacacaaaagtccacgatattcgaattcaagcgagttcgttagccgatatctatcgcgaaataatgggggaataatagatgaagacagtgatgacacaaacaaaaatggattttaagcgggcctatttaagaaatcccagatttgcttttttctctttattaatgccaattggtttttatctcttgtttacaaaagtgatgaatcaaggtctagtgagtgcaagtttcaatttacagtacatggttagcatgacgacgtatagtttaattctcagcaatgtttttacgttatcgacgctactttataatgatatgagagagggtttgttagcgttgattaacctgtcgccaactagcaaagcgacctattacacggcaaagttgcttaatctaggcgttatcaacggcttaaccattatcgttatttttgtggtcgcagcacttagtaatcagctccaattagcatggacaacatggctattaacagcggggtggttgtggctagcaagtttgccactttgtttgctgggcattagcatttcgtttttaaatgatgacaatcaaattcagttggcggcgaatttactcgcatttccacttgcgattttaagtggtctttggtggccgttagcgatgatgcctaaacaggtacaagtcattggccggcacttaccggtttatccaatcaatcaaatcgcgcaatcaattgtcttaaaaaagacagttcacttcgcagattatggcgtaacgcttggttggactgtgatattagttgggcttgtcgtatacttaaatcattatcaaaagggagcacgtcattaatgtctttttttaaacgttacattgcaatgcctcaacaatacggtctttttccgtatgtttggttactctttttatttttcccaatcgcctatgcgtttccgtttaaaacattgcggcaacaggtcattataggtttggtacttatttttgtgatcgcgtaccgcaatagttatgttgccactacgtatcgaccgttctggttgttgctccaaatggtggtgagtgcgattcttgcggtgattgttcaagcgctctatctcagtatttatacggcctgggtgtttggctcgattccgatgcgccggcgtagtttctggggttattacggagcctatctactttcaatcttggtacccactctttttctttactattattatggtggtcagatggggcgtgatgattgggttggcttagccgtctatggcttattctgcattttatccccattttcggcaggttcaattcaacgttataatcgcaaaaaccggcagttaatgcaaaccaatcaacgattgacggaaatcattaaacaaaatgagcgccagcgaattgcccgtgatttgcatgataacttaggacaatcgttttcgatgattactttaaaagcggaatatgcgcgtaagttattggctaaaaaaccggatgcggtgcctgaacaattattggcaattgaacaagcgtcccgccagaatttaaaaatggtgcgtgacattgtggctggcttacggcaaacgacaattgccgaagaattgattaatcaagaacgtaatcttagtgtagcgggcatcatcttattaaccaaggatgaaaatcaaattgaaggcttgccacaatcaaaccaacaagtattagcacaatgtttacacgaagcagtgactaatattattcgttacagtcacgccacggagtgttacgtgacgtttgcgcaatcggcaacgacttttcagatgacgattcaagataacggccgaggcttgaaaaaggctgaccagtttaaaagtcatggaatcgcagggatgcgtgaacgcttggaagtgattcagggtgaactgaccgttgacggtcgccatgggaccacgttaacactgacaatgccaatcgccacggaggcaaaaaatgattaaactttatttagcagaagatcaacaacttttaaacacggcactagccggtattttagagctagaagatgacctaacaatgatcgggaccgctacaaatggccaagtcgccttggaacagattgcaaccttacaaccggatgtcgctttactggatatcgagatgccggggttgacgggacttgaaatcgctcgacgattacatgaacaacagccacaggttaaggtcattattttaacgacctttgctcagactagttatttcaaacaggcgattagcgctgaagttgctggttatctcttaaaagacggtcccagtgacgatttaatcgtcgcgattcactcggtgatggccggcaaaacagtctacgcgccagaattagtggtcggcttaaccaatcaaccgcaaaacccactttcacaacgagaaaccgatgttttgcaggcagtggccaatggtttgagcaataaagaagtcgcgagtcaactcttcttatcggatgggaccgtccgtaattacatgtcgacaattctcagcaaactagccgccagtaatcggattgaagcaatccaaattgcgcgccataatggttggttataacggtcagactttaaaattgcatcgcagtcgttaattgactatgcttgcaagcataaaggaggcgttaatatgagtttagaaaacttgcataaatgggcatttttctatttttcacccgcattttcccctgaacaaaataccgttattaatcgcaatcaggctgggacctgtgaaatgattacggtcggttttgatccaagcgctaaaacggatggctcggtgattgaacttgccttacaattgaaggcagaaggggttcagtttatcgaactttgtggtggttttgggccaacttagacgactaaaattaatgaggccctgaactatgaaataccggtgggcgcggttatgtacggccctgaattccgccaaccattatttgaaatcatgcaataaaacgttaccaagtagagatttatctgaaaatagcagataagtctcttttttaagccttttttattaactttctgtgtgcggtccggtataattcacttataaattgtaagaatgagggatacgatgttaaagaagcgacgaacattcataatcggattgggggctgcactattatgtagtctgttcttgatcctcaatgttgctaatgtgcaggccaaacaagttttacagttgggtgcacaggcgccgcttgatacgatcgatatctcgacttcaacgggttacggtcaaactggtaatattttcgaaagtttataccgactcggcaaaaaaggtaaaattgaagctggcttagcaaagagtagtcaagtttcagatgacggtttaacgtggacttttaaaattagaaaagcacagtttagtaatggtgatccaattcgggcccaagattttgtttattcttggcaacggacgattaaaccaacgactaaatcgccttacacgaacctatttagtaatatcaaaaacgccccagcgattgcggatggcaaattagatccgaagcaattaggggtcaaggctttggataaacacacgttacaagtcacgttaaccaaaccggttgcctacatgaagaccttgatggcttacccattgtttgcgccacaagatcaaaaggtgattgaaaagtacggtaagaaatacgcaacaaagtcaaaatacatggtttactcgggaccatttacgcttcaaggctggtccggaacgagtgaagaatggcaattcaagaaaaatccgcgctattgggatcataagaaagtgaagttaagtgcggttaagtttacggtgttggaaaataccagcacagcgttatatctctatcaagatgggcgcttggatttaacccaactcgataatcaacaagttgaaaattatagtagtaatcgcgatttcaagcgttatccttacgcgcaaacttacttcttaaaatataatttcaacagtgacaatcaacaggtcaagcacattttgaacaatcaagatgcgcgtttggcactatccttagcgattaatcggaagacaatgaacaaccgcctctatggctttaaaacaaatccggtcacgggctttgtcgcctctgggttggccaactcacccgttaaaaaggtcgattttgccaaatcacaagctgtgccacacacggttgattacgaaccaaaactggccaaagaatattggcaaaaggcgctaaaagcaaccgggatgaagaaggtgacactctcattaacagttgatagtgatgatccgaatacatcttatgtcagccagtatttaaaagggcagttggaagaaattttaccaggcttccatctcaacttaagaacggtgcctagccaagttgcaagcagtcgcgatcatgagggcgactacgacatcctattatccgcttggggggccgatttcaaagatccaatttcattcttagaaatcatgctaccaggggcggccaataataccggtggcttcaagaatgcggattaccaaaaaaacgttgatttagccacgaatcaagatgctaatgatccaagtcaacgatgggctgatatggtcgaagcagcacaagtcttgaaccgcacacaaagcctgacaccgttataccaaaacgaaacgggttatctccaaaatccaaaggtcaaagggattattcataatactgctggaacgcagtggagttataagaccgcgtatattaaggggtaataagccaccaaacagattattattgtttcaagtggcgctatgctaaagtaagggtatccaatttagaaagagggtattttaaatggcaaagcaatatgaaacaacgatgattaatgaaggtggccgaaacggatttgtttacgatccagaaaaatcaacgaagtatgtgattaaagcgcctggtacagataaaactggtaagagtaccaacccggaacaactttttgctgccggctacagttcatgttttaacagtgccttggaactcgttttgagccaggatcagattaaagctgaaacgacggttaaagcaacggtttcactttataatgatggccccgcagatttctatatcggggttgaacttgtcggtcatattgaaggcctctcaccagaagatacaaagctctacctcgaaaaagcccacgaagtttgcccatattctaaagcaacacgtggcaatatcgacgttaaaattgatgtcatgtaagttaaatataaaagcgccgcaacaatcagaaatttgattgttgcggcgcttttttattttttaaattaatgagccctagtgttcatctgtaaccaactcttcaaattaacgccaacaatgcacagtaccaagccaatgatgattgcactataaccaatttgttgactggcgatgattgtcagtatcagcataatgaggcccgctagcgaataataataagcatcaaggggattgaatttatgcatgaataaaaacctgccttatatcaatagtgatttaagtatcacatggtataagccgttctttcaattgagtgggcagaacttcactattttataaacaaatcaggcgcctttttttactagattgcttcaggtatactaaataaaaatcgttatgtggggtaactaagatgactcagaaaaagaaatggccggtatggctcaaagtcgtgatgtggattgggataattggtggtggctttgccgtgatgattatgttgaatctagcttattcaaaagggctgaccgcaattgcccagagactaggtgtgccttatggctattaccaccatatgcatcatgagcggcaccactatgaagaacaatatatggccaatgatttcgacgaggtggggttaatcttaggcgttttaacggtcttaggcggcgtatacttactcttcagtttactagaaaatcaggagaaaaaacgcaagaaacatgcaatcaaacaacataataagcggcttaataaagtaaagaaacgtcactagtgacgtttctttttttgatgcgcttaaaagaacaacttatcgcagtattcagaccacttatctagaagtggaagacagaccagccactttgccagtaaactaaggtgattgataaggaggttgcagcgatgacattactgacagcaacagggattacaaaaaaatttggcactaaaactgccgttaagcagattgatttaacggttcaaaccggccagctagtggctttcttaggccccaatggcgcgggtaaatcaaccacgattaatttattaaccggtacgattgcaccgactgccgggacaattgagatggcaggtctcaggccggatagtcgccaatatcaaaagcagattggtgttgttttccaaaaaagcgttttggataatcagttgacggtttggcaaaatctcaaaagtcgtgctgatatgtatcaaggcgtcactttaacacctgaaagtgaattgattaccgcttttggtttaacgtcgattcttaagcaagcttacgggacactatcgggcggtcagcgccggcgagttgatattgcccgggcgttgattcatcaacctaaactactttttttggatgaaccgtctactggcttggatattcagacgagaactgttatttggcagacgttaaaccaactacgtcagcaacaggggttaacgattattttgacgacgcattatttagaagaagcggctgaagctgattttgtctatgttatcgatcatggtcagattattgcggccgatacggttgagcaactacaagcaacctatgcacaaagtcagttgatgattgaaaccgattatccggaagttgtcttagcccaattaacaccagaatggcgtgtcttgcaaacaaatcatcaattacagattgcgctacctgatgatcaacaggcaatcataatattaacaaaagtgcagtcggtggttacccattttgaatttcgtcagggtaatatggatgatatttttatggcactaacaggaaaggagattcgccaatgatggctttagttaaacggcacttagcgctttatttcggtaataaaagtggagtgttcttttcattattgggcgcgttaattgcgtttgtattgtacctcgtttttttgaagcataatatgctagccagttggtcacaattagcggctccacagaagttacttgatccctggttaatcggtgggacgttagctgtgacggcggtcaccacaactgccaatggcttgaatcagatgattgtcgatcgcgaatcgggaacactggccgatttagcattaactgatatgtccttcatcggcattcagttcagctacttagtaagtgctgtgatcattggcatcttgatgcagttggtcatgtttgcagcaatggttggttattttagcctcacggatcaatttgtgttgtcgctagcagcaatcggacccgttatgggcataatgttattgagtagcattgtctggacgacgtttaacgtactaattttatcgtttgtcacgaatctggattctctagggaaaatcggcaccattttagggacgtccgccggcttttttgcaggggtttacttaccaattggagctgttccggtcgccgctcaaaatttaatgaaaatcacgccgtttccatataatgcggctatctatcgccaagtattgatggctgatcaactaaaaataactttcaagcaggtgcctcaattgcgtcatcagtttgaacagacgttaggcatcggcattcagttgcagcatttaaccagttggcaagcaaatgccttaatcttagcgggctttagtgtcgtctttggcgcgctcacactggtgtttgccaagagcagtcgtcgcaaagcaatcaataaggtataataagcagataaaaggtggtgggtgatttgaaggttaattttgaacaaaataaagacttggcagatgacgatattcaagtgacggttcaagctgcccacctttcgccgacggtcatcgaattgattcaagcgctggaagcccgccagcaatcggttgatgtttatccgattacagttgatgaacgggtcgtgttagtgccaactgctgagattatcgcactagaggtctacggtaatgatgtgacgctctacacggttaaggcgacctatcaaattcggggtgttttgaagaagatactcagcaaattaaaccaacaagatttcattcaagttgcaaaaggggccgcgattaatttgaaccatctccaatcgttagaggctgctttttctggtagtatgacggcctttttaacgaatcagttgaagatgagtgtgagccgtaaatacttaccagagttgcgacaacaattagggatgtgaaaaagatgctgaaagaaagtttaaaaagtgcggggattgggttattgactggttcatttacttttttagtggtcatcgtgagcctcaattcaacggttacaataacgcgtgctaatattctaagtaattgggtcatgagtgccttgattgggattatatcaatgatttttgatagcgaaaaaataccgttcgcatgggcgatctttagccattattgtggcgttttattactggttggcttaactggcatttataacggcttgtggcccatttttatagcccatccagtgcgccatgtattgttcgtaacactgatttacgctctcgtttggctaggattgcaaattagtaactggattgatgtgcgccgaatgaatgaaaaactggctaaacgccgacaaatgaaaaaataaaaaaagaaacgcgactaaaataacgaatcttgtgattcattggttagtcgcgtttttagtttaaactctagcgtatttacgggcatcagaatagttaaaaaattcagctttggacgtgcagtcgccacgataaacaccattccagccggctctttgaccataagcacctaggtcgattaataattgttcttcagatttattgagatgaattttaccaaagccaacactataaatataatttgcgaggcggttgactaacacttcaggattcttggcagtttcaagtgtgagatagacctgactcaaaacatcggtaatgtcgagaagcgcgtttgatttatctggatgagccattaggctgttgtaaagtgtatgaatgttttccttagcaatttcttgattagtcataatgaaaagcctccacaaaaagtattatcaacatctgttctagtcttcttagtaaattttgtcaacttcaatagagttcttaacgttaatccgaaaaaaactaacgttaatattaaaaaataagatccgcttgtgaattatgtataatttgattagactaaagaataggagaaagtatgatgatatttaaaaaactttcagaaaaagaattgcaaaaaataaacggtggtatggcaggaaatagttctaattttattcataagattaaacaaatttttacccatcgttaagataggttgttggtgagcatgttatatacggatgtatcggtttccttaatgcaaaattttgttgctatcttattaatttttctattatatagatatattcaaagaaagataacatttaaacggatcatattagatattttaatagcgattattttttcaatattatatctgtttatttcagatgcgtcattacttgtaatggtattaatgcgattagggtggcattttcatcaacaaaaagaaaataagataaaaacgactgatacagctaatttaattctaattatcgtgatccagttattgttagttgcggttgggactattattagtcagtttaccatatcgattatcaaaagtgatttcagccaaaatatattgaacaatagtgcaacagatataactttattaggtattttctttgctgttttatttgacggcttgttctttatattattgaagaataagcggactgaattacaacatttaaatcaagaaatcattgaattttcgttagaaaaacaatattttatatttatatttattttatttatagtaatagaaattattttagcagttgggaatcttcaaggagtaacagccacgatattattaaccattatcattattttttgtgtccttatcgggatgactttttggcaagtgatgctttttttgaaggcttattcgattcgccaagaagccaatgaccaattggtccggaatcaacaacttcaagattatctagtcaatatcgaacagcagtacaccgaattacggcgatttaagcatgattatcaaaatatcttgttgtcgttggagagttttgctgaaaagggcgatcagcaacaatttaaggcctattatcaagaactattagcgcaacggccaattcaaagtgaaattcaaggggcagtcattgcacaacttgactacttgaaaaatgagccaattcgaggattagtcattcaaaagtttttggcggccaaacaggctgatgtcactttaaaatttgaaatgaccgaaccaatcgaattagcgacggctaatttattaacgattatccggattatcggtattttattagacaatgccattgaacaggctgttcgagaaacagataaattagtgagttgtgccttcttacaatctgaaggcttaatcgaaatcacgattgaaaatacggccagtcaagttaaggatatccaagcattttcagagttaggctattcaaccaaaggtgctggtcggggaactggtttggctaacgtacaagatttgattgccaaacaaaccaatttattcttagaaacacagattgaaaatagaaagttacgacagacattgatgattacggaggaaacttaatttgtatcccgtttatttattagaggatgatttacagcaacaagcgatttatcagcaaattatcgcgaatacgattatgattaacgaatttgcaatgactttaacatgcgctgccagtgatactgagacattgttggcggcaattaaggaccaacaacgaggtctattcttcttagatatggaaattgaggataaccgccaagccggtttagaagtggcaactaagattcggcagatgatgccgtttgcgcaaattgtcttcattacaacccacgaggaactgacattgttaacattagaacgaaaaatagcgcccttagattacatcctcaaggatcaagcaatggctgaaatcaaaaggcaactgattgatgatctgttgttggctgagaagcaaaatgaagcagcggcgtatcaccgagaaaatttatttagttataaaatcggtccccgctttttctcattaccattaaaggaagttgtttatttatatactgaaaaagaaaacccagggcatattaatttgttggccgttactagaaaggttacttttccaggtaatttaaatgcgttggaaacccaatatccaatgctctttcgctgtgataaaagttacttagttaacctatctaatattgccaattatgacagtaaaacgcgtagcttaagttttatcgatggcagtgaagcaaaggtctcgtttcgtaaatcacgagaactagtagctaaattaaaacaaatgatgtagcgcatattaacgtttaaccgataaagttgaacgttaatattttttttacgcagaaatggcaaattgaagcataatagttctataaatggcaattgaactagcctgaaacaggcctattcataaattaaggagaatataaaaaatagtgtttcttaagaaaagtaacgggttaattattatttcaattttattaataataggtggtattggtctaataatcatcttaggcaatgaagatcgttttagactagcggatataatgcttattatcgggataaccttgtttattaatattaagttcaaggaccgtcattaacgtgtttgatagacgtttaagataaaaaattaaacggtgaagtaaatatcattagagaagcatctgaagactttagggaggggaagttatgaagagattatgcatattagcttatcaagggctgccatttctgattgataatttggttatctttaataagaaggaacggaattttgtgaagaagttaaacaatagaatcgatgaactatcgatgagttggcaagtagaacttgatagctcatttggaaatattagtgatattgaagtcaaagcaccgcaagccgtgttattaaaaaatggcttgcgatatcgttttaatactggcagcttccctaaaaatgatatctatcaattgggagctttagaattacaagaaggtgatattgatgccgttatttcttttttgaagcatttagagaggtagtttgaatttctttgatacacaattattttgtaaggtatcaactagatactttattaaaaaaattaatatttatacgattgaaaaatcaatgactggttattttttgaaatgccttaattaaaagcgcttatttattgtatgttgtgaaacggtcttcaacagttgcgtattccttagcatctgctggattttcgattgagccaaatggcatttgagcgcgtagtttccagtttgatgggatattccatttagcagcaactgcttcatcaatgactggattgtaatgttgcaagttagcaccgatattttgttcagcgagtgccatccatgttgcgtattgtgccataccatttgattgttctgcccaaactgggaagttttcagcatataatggcacgttttcttggaagcctttgataatatcttgatcttcgaagaacagaattgtgccgacaccaccagcaaatgatgctagtttagcttgtgtattagggaagtattcagcgggtgttaatggttttaaggcacttgctgtaatatcattccacaaagtattgttggcttcaccgaataaaataactgcacgtgaaccttggccgttgaaagcacttggtgtttctttgattgtcttgaagattaattctgaaacttcagcttcagttaagtcgatgttttgacctaaagcgtagattgaacggcgttgttgttgtaaatcgaataagtttgtcatatttaaaatgcccctttagaagttagtttattgataacaggtattactatatcatacttacaaaagataagtaaagtgttttgtaagcctttttttgttaattaatttataggttgttgacaattcaattgctaaaagccgttatggcgctatttatagcatatctaaatgttgggattaatatttaatttagtaatatttttttggcgattaggattattagtttcagaaagcgttttattaatcttaacggtttatgtctgggttagaatactctataataaggagctatgagcagttgtctgtagaaagtagggtgacgattaattgaaacaagttcaaaatgttattcagcaacttacagaaattagaacagcactaatgaatggtgaaatttatcaatctgtaccagaaaaagtattagccgtcatggacggtgttcaatacaaaacacggcgcacgcacattgcaattccggatgatgcggatgccgctttggcacgaattgccgcaattgaccaacaaatcaaaaccgatggtaaagcagcgcagatatcggatgaagcgttggatgatttattacggcatatggctagtccagatgcacgtgtgagagataagggtgtcttttatctctttaatcggttattacgccaaaccgttttaacgaaagaacaattattatgggttaaagatcgtttgttaagcgatgactatttattcgcccatatttttgaacctgaaaacgatggtgttttcttgcgctcatttagcgcgatgtttttggccggtgttttatacgccaatcggacgttctatcacgttttaacagaggctgagttagtggcgattgaaatgcgcattatggcctatacggtcattgaattggattcaagagggtatgttgaaaataaaggctgggcgcacgcaatgacgcatattattaacgtctggtctgaactaaacgaaacgaccgaattacaacgggcggataaattattaatgctagtggttgtgatgcaagcttatcgcttctctgataatgcattagcgtatggtgaagacagtcatttaaccaacgtgattatcaatttaatgaagaagaatcggttatacatcgattactttttaatcgtgctgcaagaatggcaacaagcgatgttaaccattgcgccggaagaaaacgtggcgttttggaatcgttggtataaccggaatcgatttttacaatcattgctggtacagccagaattaccagaaaaaattgcggattatttacgtaaaatttctgatttattttaagactattagtgaggattgaaacaaggatgacagtaaaaggtgtaatttttgatgttgatgggatcttagtcaacagtgaaccatattattttgaacaacgcttaacatttttaaatgcaattggggcaaagttaaccgttgaagaaagtcgacgccaaattggctctaacatgaatgccgttttaaaacaggtttatccgggtagaactatgaatgactatgcgatgattaaagagggctatcgctcttataagcgtaaacatccgattcgctttgataaaattttaaatcaggatgcgcagacgctgttagccgagattgcaccgaaatatcaaatcgggttggcctcagctggtgaacgtcaaattattaatcaaatgcttgctgaaactaaactaacgccttattttgaaacaattgtcagtggtgcggagacggctcacaataaaccggcaccggatgtttatacaactgcaattgcacaattggggttaaaaagtgatgaagcagtggccatcgaagattctgagtttggcattaaggctggtaaggcggcgggattaaccgtcattgctttaaaaccgcttgacagtcaatttaaaattaaccaagaagaggctgactaccgtgttgaatctttaaccgaggtaccggctattctggcacaattatcataaaagtataatcttgaacctgagattattttttagttaactggctaaataacgtatattaatacctgtttatcgtatataatggtaggcaggtattaagtgtcaacggggttaaataagaatgtcactggggaatttgaagatgatgaagatattaggggaaaactttaaacgaatccgtaagtcaaaaggattcacgcaagctgatttagcgcatggtatttgtacgcaagcgacggttagtctcgtcgaacgtcgtaatcaggtgccgagtacgaaaatcttaatgcagctttgtcaacgcttggaagtctcggtcgataaaattatcgtccaagaagaagatcaattacacgttttaatgcgtaaactacaagatttagcgaatgatgatgagtttgaacaggcgcatcacattattcaacagattcatagtaatgagttagccgaacctgaagattttaaacgttactactattatcaggggcagattagcttattattacaagatagtccggatgatgcactctttttcttccaccgggcttatgaacaatatgtgacgtcacgaacggatacgtatggtgttttatgtattattggtatgagtttggccaatgtgaagaagggtcaattagaccgcgcgcaaaagcaagtcgataaagcaatccggattatggatagtgaaccgggcttaatgatgattgattttccgaatcatttgcgcatttacggcaccattgctgaaattttctgtgcattaggcgcttatccgacagcacgacgttatgtgaaagaagcaatccaagatgcactcgataaacatagtttgtatctattggattatctctacttcgttttaggccaaattgaagttcaacgcgaaaacgaccaaaaagcattgcaacattttcacgttgcccaaacacttgcgcaaattagaaagcatcctttaattttgacgcaagccaacgcacaaattcaaaaattagcataaaaaaagctgaggatttaaatcctcagcttttttagtgccattaaatatcttggccaatactacttttcttcttattgagtgcatgtttattgtcgagatctgttctaaccactaaaacgtcgcaaacagctgtccgagtaacgtattccgttactgaaccgattaataatcgttcaaccgcatttagacctgtcgcaccaatcatgatgagatcgatgtcttttttctcagggacttcgcgagcgataaggctcttaggtgccccgtattcgatactataatcgacgtcggttaagccgagatcattggcagtaacgatatattcgtccattgttttcttagctgtttcagttacttgttcgaccattgctgaatcgaaacttgaaatgttttggaaagcgcgtgtatcgataacgtgaatcaaatgtaattgaccgttgtttctaagggctacttcaactgcttttctaaaagcaagttcagcttcataagaaccatcaattgcgaccaaaatatgtttatattgttgtaacatagtcatcacctcatttagatttacaagcttattgtacgctaattcaagaacaaaagtaaaacttaaagactaccagcaaaagataatgcaacaaatccagtgactaaactagcggcaattacggtgattagattccatgtgaggggcagtgttataaaaataacgaggcccaacacagcaattaataagagtaaccaaccggcaactagcacgcgacgacctaagcgacgattctcagcgaggttgaaaagtaaaaatgatttattttggtagtaacaaagtacaccgcctaatagggcgatgactaccaaaaataaaataaggacaaaagaaatcaaaagaaaacctcctaaaaattgtcaacaaaaaagggccaacgcaaacgttagccctgtcaaagtcattggactttgggaaatctagtggtaccgtagaagcttcccgatagttgagcccgctttaatatgcaggtgggtcagactattgttagacttggttccttcatgaaaaagtatacacttgctaacaactcgtccaccccattaacgaattacttgatcggtcaacataaggtgggaagacgcgcataccttagaaatcctactattatagtagcacgcttatgggattggtgcaacttttttgtaaccgttcacttgtggcggcttgcttgtctcagccgttcaagttgttgtttcaaaacttgctcgtatttaccagttgctttggcttcgtagtaatgactccctaaaagttttgtcgggaggtaatcttgtgcgacccaatcattgggatagttgtgtggatacttgtagtctacaccatgaccaagcttagcagcaccggcgtaatgggcgtcttttaaatgcgcgggcacttcaccggccttaccggcgcgaatgtcgcctaacgcattatcgattgctgtgatagcggagtttgattttggtgagagacagagatcaatcacggcaactgccaatggaatccgtgcttcggggaaacctaattgcttggcggctgttactgcttcaacggttcgagcgcaggcttgcggattagctaaaccaacgtcttcataagccatcgtcatcaaacggcgactaatggaaggcagatcaccggcttcaattaagcggcccatataatgtaaagcggcgtcaacgtcgctaccgcgaacagatttttgaaaagccgagatgacgtcatagtgcgcatcgccatctttatcatgggtaatggcctttctttgaacgcattcctcaatgacagcaatatcaatgtcgattaaaccagtttctgggtttttaggtgtcgagcggacggctaattctagcgcgtttaaggcgcttcgaagatcaccattggtgacttgtgcgaggtatttttcagccgtttcatcgaggttgacgggttcatcacccaagcctttttgagggtcggttagggcccgctggatggcgacgtgaatatcggcttcattaagtgggtgaacttcaaatatctgggtccgactccgaatagcggggttaatcgtgatgtagggattttcggtggtagcaccaattagaacaatccgaccgctttcgagatggggcagtaagaaatcctgttttgttttatcgagccgatgaatttcatcgagtaataaaataacagtaccgctcattttagcttcttcagcgacgatttgaagatcctttttactatctgttgcggcattcagcatccgaaaggcgtattgcgtactaccagcaatggcgctggcaatactggtttttccggtgccaggtgggccataaagaatcattgacgagagtaatttggcatcaaccattcgtcgaatgattttttgcggacccactaagtgtgtttgacccacaatttcatcgatatttgtggggcgcatacgatatgcgagtggttgttgcatagctgtcatcctttaaaataatgtttaccattagtataacacatgtcaaaaatttaacgacgaacaagcgttttacaaaacggtggggatgtgtataatggggatacaactttgaataaaagaggcctcgatatgtccaatcaactatttgaacaaattcaacaattacatttagccccacttttaaattggggggccttcgggattgaaaaagaagggcaccgggtgacagccgctggacaattaagtccgctaagtcatccagcgagtttgggttctcgtgattttcatccgtacattaaaactgattttgccgaaatgcagacggaattggttagcgataccttcgataataccgacgaaatcatgcaacagctaggtgccttatcagaagtacttgagatgaatctagccgacgatgaattgatttggcccctcagtatgccacctgtattaccaagcgacgaaacgacgattccaattgcagacgtcgcaccagatgcgcgtgcttaccgtgactacttagccaagcgttatggtcgccggctacagatgatttctggcgttcactttaattttagcctggccccagccttaatcgcgcgcttatatgatgaggtctatcatgatcaatttgcaacggtgaaagattttagtgatatgttgtacttacaaatcgcacagaattatagccaatatcggtatttattaacttatttatttggtgctagtccgattactgaagcactttttcaaacagatacgacgaacttgccagattatgcagtccgcagtttgcgttcaagtcaactctttggttatgccaatcatgacttggttgtctcgtttgaatcggttgctgcgtatcacgattcattggaacaggcaattagtaagaaacaattgatttcagaacgtgaatattacggcagtgttcggttacgtagtcacggccatctcgcccaagacggtgttgattatcttgaattccgcggttttgatttgaatccattcgctgcaagtggtgtgacacaagaacaacttgatttcttacatctgttctttacgtacttattatcgttacctaaggctgctgaaagtttaacggctcgcatggcagaagggcaacaactaaatgaggcgattgcgcttgaagatgcgacgaaagcatcggcacaacaagctaagatgcaaatgttgatgactaatatccgtcaatttatcacgacttatcaattaaatcaacgatttattgatgcgtggacagttatgaatgaacgagttaatgacttcaaacagacattaagttatcgactagcccaagaagtccaagacgattctctaaccgcttttgccatgcagcaagcacggcaatttaaacgcgaattaaccgagaaactattccaattacaaggctatacggatatggaattatcaacgcaaatgttaatgctagatgcctttcaaaaggggctccacgttgccgtattagatcgcagtgatcaatttgtcgagttaacctaccaacaacaccatgagttggtgaaaaatggcaatatgaccagcctcgaccgtctaattagttggccgttggtggataacaaagttgttaccaagattgtcttggccaaccaaggtattcgcgtgccagccggtgctgaatatgcggatttagaagttgctaagcgcgactaccaagcggcctttgggcaacgggcgttggtgattaagcccaagactagtaacatgggggccggtattacgacctttttaacacggccatcagaaactgattttgttacagcctttaaactcgcgcaacaatatgaccaacaggtgttagttgaagagtatatcgccggttcagaataccgtttcttagtcatggatcatcaggtgcaagccgtcttggaacgcgtgcctgccaatgttgttggcgatggccgttcaacaattacgcaattagtcgctaagaaaaatcgaaatgagttacgtggtgaggatcaccgcacaccgctccaaaatattcgcttaggagcgcgtgaacaattgattttgaaacaacaaggttaccaagtcgatgatgtgccaatgcgtgggtcgcaggtcttcttattacaaaattccaatatttcaaatggtggggattccgttgatgtgacggatgatatcgataagagctattttgcaattgccgaaaaggttgcggaaattcttaatctgaacgttaccggtgttgatatcattattcctaatttatatcaaccgtatgatcctgaacatcctgaaatggcggttgtcttagaagctaactacaatccagcgatgttgatgcatcttttcccaatgatggggcaacagcgccgtgtgacaactaaaatgttaacgatgttgttccctgaaatggattaatttaaaaagaataccaaaaaagccgttggcattgcccacggcttttttgtgtggttaatcgaatagacgaccgaaaagcccttcttttttaggcttttccggagtcggtgctgctgatggatatttggcgctaattgcgacagtttcgcaattaatcgcgtctttggcaacgactagtaagccgattgcttctggtgcagtttgcgcagtttcgttattgaccaaagtaaattcaacttggtgtttggtaattgccgcgagataattagtggccgcgtcatttttaccattcaagagaatatggtaagccttgaaatcgggtagatggctttcaaatgtcgcttgaattgcaggttggcttaattcagcattggtgatgctgagtaagacgcgttcgcgcagagagcctaaataccgacggcgttcatcaggattggtttggggcgcgccatggatcgcactatctagatgttgttgcaattgatcgttctctgacaaaatggtcacctcatttctaatttgtgctatattagaactaaacctaagtataacatgttggaggaaaaagatgtttacacgtgctgattttgaaatttttgatgacccgactctaaaggggcgtttaaataaaatttatacggaacttgatcccaaatttgaagtatttggggcccaattacaaaatgaactagctgtagctactaaccgcgaatttacgctgcatattgccaaacatttacgccgcttcaaaaatccaccaatgaatacttggatggcgcttagcgagagttcacgtggttacaagatgatgccgcactttgaagttggcttttgggatgatcgaattttcgtttggtttgccctaatggccgagatgccagacaagacggattatgcaccactattggcgagccaatcagaaaaactcttaagtgattttactgattatgatttaagttatgatcacatgacgaaacaaaaattcccgatgtcaccggataacttacagttgatccaagacaagtttgctaagaccaaaaaaggggagtggttgctcggaaaggtctatctgaaggacaatcctttgtttgaccaccctgaagaactaatggccgatatccagaccacattattaaagatggtgccactttacgaattaataaatgctaaataaaccaaaaggtgctgctaaattttagcaacgccttttttgatgacaaaaaaagagccagaccgaagtctgactctttttgtttaacagataacagcttatctgttgtagaattcaacgattaaggcttcgtcgatttctggttctaattctgaacgttctggtaaacgaacaagtgaaccttttaagttgtcagcgtcaaattcaacgaatgaaggacgaccaacagtgccttcgatagcgtctttgatgataacaaggttcttagatttttcacggattgaaatttcttgaccaggttttacttcgtatgaaggaatatcaacacgtttgccatcaacggtaacgtgaccatggttaactaattgacgtgcttgtgcacgagtgcttgctaaacctaaacgataaacaatgttgtctaaacgttgttctagtaagatcatcaagttaacaccatgtttaccttcgcgaatcttaccagcgcgagcaaataagttccggaattggcgttctgttaaaccatacattaaacgtagtttttgcttttcgcttaattgcataccatattctgaaatcttaccgcgacggtcgttaccatgttgaccaggagcgtatgggcgacgggcaagttctttacctgtacctgataatgaaattcctaaacgacgtgaaagtttccactttggacctgtataacgtgacataaaaaaatcctccaataattgttttggagtaaaataatccgatgtaaacttagtaatcgttcagttcacttattaacaatcttcacctttgcagccgcaaggttacacaattgaaccaaaactctgggcaaatgaactgttgacggctttaccgtttactgctgcattattttacacaatggctagtatagcttattcatttggacaacgcaagctattttaatagttgcttggtttaatttttatacaatttatcggcaaatattgctgtatcaacggcttattcatgctataatcaagattagtttgtaataaagaaatcggttaactatttaaaaatctgagttaaatcgcaaaagggtgggtctttgaatgctttacattctcataggaatcgtagtcgtcgttttgattggctacttaggagttgctttttatcagcgttacttcaccaaacaaattaagagtttagaagaacgtaagggcgctttaatggcgttgccgattcccgaaaagttgacgaagttgcgctcactacgtttaacgggtgaaagccaacaaaactttgatcgttgggaaaaacaatataatgacattaccaatcataattttgaagcgattgaagcttatttatttgatgcggaaacagccaatggtaagtatcaattcctattagtagcgcggattttaaaacaactacgtgcctacctacaggaaacggatcaagatttggttgatgtcaaagatgcgctggatcaactattagcaaacgaagctgatacgcgcgaacaaatcgaaacgctgcgggttaagtatcaaggcctgcgcaaacgtctgttgactaagagtttttcatttggcccaggactagaaggactagaagccattttaggtcaactagaagaagattttaaccaagctaatgaattaacgggtgccggtgattacctaggtgccaagatgatgttacaaaaattaattgaacaaactgatgatttagaagataaaatggcacgtattccgaagcgttatagcgagttagccaatgagttccctgaacaaattgacgaaattagtgaaacgtatcaagccatgttgcgtgaacattataattttggcgataatcaattggaagtgcagctcacacaagtgacagaacgcgttgataagagtttagatttaatggaagctcttgatattgaatctgttgaagccaataatgttgaaattgcgcaaaatattgatcaactctatgcgagtttagaggttgaattaaatgcacgccaaacagttgaggaacatattggtaagactgagacaattgtgtcacacgcgcaaactcaaaatcgcgaactactattagaacttgatcatttgaaccaaagttatgccttaacgcatgatgagttggtcactgctaaaaaattaacgaagcaaattaatgagcaaaaagcgatgcttgaaggccatcaaggtaagattgccaatcatgaagccgtttattctgttattgcggatgacttaatggccattgatgagcgccttactgagattgaaacacaacaaagagatattcatgaacaagtttctggattacatcaaggtgaagcagttgctaacgagaatttacaacaattcgaattagaattgcgaaatttaaaacgaaccgtcgaaaaattacacttaccaggtcttgcggatagttaccttgacttcttctttgtcgtaacggatgaaattaaacgcttagatcatgatttaagtcagattaagattaatttagacgagattgccaaacaaatggtacttattcaagatgatctagataagttgaaagtcaaaacaaataatttgatcgatagcgcgttgattacagaacagctcttgcaatatgctaaccgctaccgaattgatttccctgaaattcaaacggcttgtgaagaagcacaagcggtctttaaccgtgagtttgattatcctaagtcagttgatattttagcaacagctttagaacgaatcgatccaggggcttatacgcaggttgaaaagaactattatagtcaaaaacaaactgatgcattataatctttaaaaaagtgggctaaaagatagcgctgatattaatcaggtgttgtcttttggcccactcttgtgtttaatgtaagatagaacactggtctttataaaagaatttgttataattaaaaaagtttaaatactaatttttagtaagaaggatcgataatgatttattttgataatagtgcgactaccaagatagcgcccggcgcgctacaaacttaccaggcagtcagcgaacagttttacggtaatccctcaagtttacacgttgtcggcgaaaaagcatttcatcttctagaacaatcacggcagcaaatcgccgatttattgaacgttcaatccgatgaaatctacttcaccagtggcgggactgaaggtgacaactgggtattaaaggggactgcgattgaaaagagtgcttttggcaagcatctgatcacaacgtcagtcgaacatccagccatcattaaatcaatgcagcaacttgaaaaattaggctttgaagtgacctacttaccagttgataagtttggccggattaatccggctgatctaaaagcggcgattcgttccgataccattttggtgtcaatcatggccgttaataatgaaattgggacgtgccaaccgttaatggcagcggcagaaaccttaaaagattatcccaatatccatttccacgttgatgcggttcaggggatcggtaaaggtatccaaaaagaaatctttaacgatcgcgtcgattttgtaacactctctgggcataagtttcatggcccacgtggcacgggaattttatacaaaaaacgggatcgtcatcttgcaccgctactaacaggtggcggtcaagaacatgatttgcgttctggtaccgaaaacgttccggcaattgccgctatggctaaggcccttcgtttgttattgactgatgaagcacaaaaggttcaaaaacaagcagctattcgtgaacgcatctaccaacatgtcagccaagctgaaaaaacggtgatgttttcacaattgacacctgattttgcaccgcatatcttatgttttgcaatcaagggtgtccggggtgaaacgacggttcatgcttttgaagaacacgaaatctatatttcaacgacgagtgcttgttcttctaagaagggcatggaatcaagtacgttaaaagcgatgcacgttaacgaaaagattgcgacaagtgccattcggatttcattggacgaatataacactttagctgaagcagatgaattcatcaaagcctttgaccaaattaaccaccgtttcaagaaaattaattcttaaaattaaacattaagggagatattaatgcaatacactgaaattatggttcgctacggcgagctctcaacaaagggtaaaaaccgtaacgattttatcggtcgtttgaacggtaacgtgacaaaagcacttcacgaatacaagcaattaagaattcatccaaaacgcgatcggatgcacattattttaaatggcgacgatgctgaaggggttatcgaacgtttgcgccacgttttcgggattcaaaacttttcaccaagtattgaagttaatcgtgatttagattctgttaaagaaacagctttggcgatgatgaaagaaattggtaaacccggtatgactttcaaggtcaatacacgtcgttctgatcataacttcttcttggataccaatgatatgaaccgtgaattgggcggttacttatcagacgaattaccagagttagaagttcaaatgaaaaaacctgatatcacattgcgcgttgaaattcgccaagatgcgatttatttaacaaatcaagtgatccaaggtgccggtggtttaccagttggttcagccggtaaagggatgttaatgttatctggtgggattgattcaccagttgctggctacttaacacttaaacggggcgtggatattgaaatggttcatttcttcagcccaccatacacaagtgataatgctttaaataaggcgaaagaattaacggctaaattggtaccatacgttggcggaattaagtttatcgaggtcccattcactgaaattcaagaagaagtgaaacattctgtaccagaaggctacttgatgacgattcaacgacggatgatgctgcgtttaacggatcaaattcgtgccaaacttcaagggttagcgatttttaatggcgaatcagttggtcaagtggcttcacaaacgcttgaaagcatgatggcaatcaatgacgttacaacaacgccaattgtccgcccggtagcaacgatggataagaatgaaatcatcgaaatcgctaaagatatcgatacgtatgatttatcaatcatgccatttgaagattgttgtacaatttttgcaccaccagcaccaaagacgcgtcctaatttggataaaacacgtttttacgaacaacgaatcgatgtcgacgctttaatcgaacgttcacttgctggcgttaaggtaacagaaatcaaagcaggtgatcaattcttaaatcaagacgaagagatcattgccgaacttttatagcatcaaacggtccaaccagaaatggttgggctttttttgtttttaaaagaatatgaaatatttcacaaaaatgaaagcgcttatgttatgatgaatttatcaggattaataaagtgaggttagcaaaatgagaacaccaaagcatgatttaccagaagcagttgctaaacggattccaatttattatcgttactttaaactactcgaaacagatggtatcgagcggattaaatcggaacaattggcaaaattggttgccattccttcggcgacgattcgccgcgacttttcttatattggtgacttaggccggagcggttacggttatgaagtgagtcacttaattcaaattttttcagctgttttaaaagccgatattctaactaaaatggccgttatcggggttggtaacttgggccgcgccctaattgaaaataactttagaagaaatgacaacttacagattacatgtgcttttgatacgaaccccgcattagtcggtcagactttaaatggcgtaccaatctacgccattgatcaactggcgaccgttattcctgctgctgggatcacaaccgcgatttcgactgtgcctagtgaagcctcgcaacggtcagctgaacagctgattgatgctgggattacatcaattttgaattttgcaccgacgcgtctgcaagtgccacggcatatcaatgtacgttatctagatttaacggcggaacttcaaactttattattatttgaggaatgaaggccctagcctattgacctttggcgtcgactcagctaaactattaacaatgcgttgaacaagagcgattaatattggactagtttagagagaagatgcatggctgagacgtcttccaatgaccaattaatcggtagcttgtgagctgttaacctgaaatttagtagggctaaccggaccatttcgttcgttaacaaatcatgagttggggactagtctagtcctaatttaggtggtaccgcgaaaaagcattcgtcctattgtgaggaatgcttttttgtttgccattaaacgcaatattcaaaaggagtgaagcagatgactgatcacaaagaaatgtcaaccaaatacgatcctaatcaagtcgaagacggtcgttatcaagattggttaaaagaagatttatttaaaccgaatgccaatccagatgcaaaaccatattcaattgttattccaccgcccaatgttacaggtaaactacatttaggccatgcttgggatacaactttacaagatatgttaattcgccaaaaacggatgcaaggttacgatgtgttatggctaccaggaatggatcacgccggcatcgcaacgcaagccaaagttgaagcaaaattagcagaacaagggatttcacgttatgaccttggccgcgaaaaattcatcgatcaagtttgggaatggaaagatgaatacgccgcaacaattcatgatcaatgggctaagatgggcttatcacttgattattcacgtgaacggttcacattagatgatggtttatcagacgctgttcgtaaagtctttgttaacttatacaacaaaggactgatctatcgtggcgaatacatcatcaactgggatccaaaagcgcggactgctttatcagatatcgaagtacttcatcaagatgatgaaggggccttctatcatgttagttatccattgacagacggttctggcagcattgaaattgccacaacgcgtcccgaaacattacctggtgatacagcaattgccgttcacccagatgatgaacgttacgctgatcttgttggcaagacggtcacattgccattaatgaatcgtgaaattccaattatcgccgatcactatgttgataaggattttggaacaggggcgcttaagattacaccagcgcatgaccctaacgattttgaagttggtaaccgtcatgacttaccacggattaacgtgatgaatgaagatgcaagcatgaacgaaagtgccggtaagtataacggtatggatcgttttgaagcacgtaaagcaattgttgccgacttaaaagaacaaggtttcttaattaaagtcgatccaatgacgcatagtgttggtcattcagaacggactggtgttcaagttgaagcgcgtctttcaacccaatggtttgttaagatgaaaccacttgctgaaatggctttgaagaatcaagaaacagatcaaaaggttaactttgtgccagaacgattcgaaaataccttcacacaatggatggaaaacgttcatgattgggttatttcacgtcaattatggtggggtcaccaaatcccagcttggtaccataaacaaactggtgaaatgtacgttggtgaagaagcgccagaagatatcgaaaactggacacaagatagtgatgtcttagatacatggttcagtagtgcattatggccattttcaacaatgggttggcctaacacagaagcacctgatttcaaacggtacttcccaacaaatacgttggtaactggttatgacatcatcttcttctgggtatcacgaatgatcttccaaagtttggaattcacggaacaacgcccattcgaacacgtccttatccacggtttaattcgtgacgaacaaggccgtaagatgagtaaatcacttggtaacgggattgacccaatggaagtcattgaaaaatacggtgctgatgcattgcgttggttcttaacaagtggttcaacacctggtcaagatgtgcgttttagttacacgaagatggatgctgcctggaacttcattaataagatttggaacgcgagtcgtttcgttatcatgaatcttgaagatacaccggcaccaactaaggttccagaagctgctaacctcgatttaacggataaatggatcttaagtcaattaaaccaaaccgttgctgacgtgacccgtttatacgaaggctttgaatttggtgaagctggtcggacattgtataactttatctggaatgatttctgtgattggtatattgaaatggctaaagaagtgctttatggtgatgatcaagaagcaattgccaataaacgctataacttagcctacgtattggaccaaacattgcgtctattacacccagtaatgccatttgtaacggaagaaatctggcaaagtatgccacatactggcgaatcaatcatgaccgctagctatcctgaagtacatgctgaattagatgatcaagaagcaacaacccaaatgaacgccttgatcgacttaatcagaagtgttcggaatatccgttcagaagcaaatgccccattaagtaagccaatcgatatcttaatcaacatccaagatacactgttgatggctatctttaagcaaaatcaagactttatcgaacgtttcgttcatcctaagtcacttgaaattgcagaaggcctaacagcccctgcattagctaagacagccattatcagtggcgctgaagtttacgtgccattggcagaactattggacttagacgaagaaattacgcgcctagaaggcgaattgaaacgtctaaacggcgaaatcaaacgcgcacaaggtaagttagccaataaaggcttcactgaccgcgctcctgaaaaagtcgtccaagaagaacgcgataaacaagctgattatgaacaacaatatcaatcagttgaaaaacggcttgcagaactaaaagcagctcgttaaagcacatctcaaaacgccaccttattttaaggtggcgtttttgtatgccatcagtttttggcaaccgattagcggtcaatctatgctaaaatggaaggagcatgttaaaggggattgagcaatgttggtgacagattacgaaacagctttggcatatattcattcacggccaagattacataaagaagcaaatttaaaccgaatgacccagttattagcggcactgggtaatccacatcagggacaacagtttattcatgtgacgggcaccaatgggaaaggctcagtagtcaatatggtcagtagcttgctggtcgaattgggtttaaaagttggtcgctacacatcgccatttattacccgtttcaatgaacgcattgcgattgatcaacaaccaattgcggatgacgatctggtcgcagttacgcaacatgtgcaacagacaattgaaacagttcaacaagcagacaccacttttgaagtgacggaattcgaactgattactgcaattatgttcacctatttcaagcagcaagcagttgatattgcggtcattgaagttggcattggcggcttatacgattctactaacgtcctaacaccattgatttctgtaattacttcggtggggttagatcatcaagctttgctgggcgatacgctggcagcaattgccacccaaaaagccggcattatcaaagcgcaacaccctgtagtgattggcaaattaccagcggaagcacaaaccgtgattgttgaaacagccaaacaattagcaagtccactagcaattagtggggtcgacttttcgacaacagcggttaaaaccttaccaacttgggggcaacagttaaactttcagaatcaaacggtgacacttaagcaacttcaaataccattgatgggcgattatcagattgaaaatgctgcagtagcgttagaaaccttttgtcagtatctagcgttgacgcagcagccacttgatattaagacgcttaagcggggcttggctcacgtgagttggccgggccgctttgaaaaagtaaatgatgaaccgttgattattttggatggtgcgcataatccagccggtgttgagcagttggttaaaacagctaagcatcaatttaaacatcaagatatttatattttatttggtgctttgggtgataaatcactggctgggatgttgccccaacttaatcaattagcaacacacttagtattaacgacggtgccggataatccgcgagctgctacccaggcgcagtacgcggcagttgataacacgattccatttgaagcggattggcccgtggcattaaccacaatgatcagtgaattatcggccgatgatgttttattggtgaccggttcgttgtacctaattagtaccattcgtagttattttaaaggagtgtcatagatgcaaactagagggattatttttgacatggacggcttattagtcgattcagaaaaagtttattatcaagctaaccaattagcggcgcaaaaaatgggctttgaggtgacggcagaagaccatcaagccattctggggacgacagatacttatttacgccaatatttcttacagaaattaggctcaccagaattagtgaagcagtttattgatttgtcttatagaacagttgatgaaattattcaagaccaaggggtagccattaaaccggggttagtagaattattggactactgtgacaatcacgggattaatcgggtgattgcttctagtaattttagaacaatggtcgaagatttcatgcaaagcacagggttaaagccccgtttcaaccagattgtctcgggcgatgaagtgacacacggtaaacctcatccagaaatctttttaaaggctttagataaacttgccattccagcccctagcgctttagtactcgaagattcaccaaatgggattttagcggctagcaaggctgacattccagtgattatggtgccagatttgattgccccaactgccattactaaccaacaaacattggcaacggttgataatttagcagccgttattccgtttttagaaaaataaaggaccagttaacacgtatagttaaatgaatcgaaaaggcgattaaaaatgccttttgcaggaggctatgacgatgttaacgagtcaatcaaagttacaacccagagagcaagtcgcactgtatggtgcggccagtctaagtgatgaacaattagcaaccgtgattttacgttcgggcacccaacatttacctgttgaagttgttgcccaacgcttattacaacgctatcccgactttcaagatcttgagcaagcggacttagtacaattgcgtcaaatcgaaggtattggaccggttaaagcgattgaactccaagcgatttgtgagttaagtcggcgcattcaaaatcagcggacattacgttttggtgtagtggcttctagtcagatggtaggccaacggatgattgaatccttagcgggagagacacaagaacagctattagcggtctatttagatgttaaaaatcagattattcagattaagcaactctatctgggcacacttaatagttctgttgcacatccgcgggaagtcttcaaatgggcggttcagtattcagcggctaagtttatcttggtccataatcacccgagcggtcaattggcaccatcaacgcaagatattaactttacaaaaagaattgttaattgcggacagttgatggggattacttgtttggatcatttaatcattggtagctcacagtacttaagcctacgtgaagaagggtatctagtcgattaaaggtgttttgaatcttgttaagaatctattaattttaaggtagacttgaaaattctcctgaaaatcaggtaccatgaagctacattgcgttttttattattaaaaattatgatataatgccaatgactataaaaacgtttggttattgaaggagagaaaaatagtgttcggattagggactagaaatattggtatcgacttaggtaccgcaaacacacttgtatatatggacgggaaagacattgtcttaagagaaccctctgttgtcgccaaaaatacacaaacaggcgaagtcatcgctgtcggttccgaagcacgcgacatgatcggccggacacctggtaatattgtagcgattcgtcctatgaaagacggcgttattgcagattatgatacaactgcagcaatgcttaaatattttatcgaaaaaacaatcggccattcatcaagcaagccatttgtaatggtttgtgtgcctagtggtgttacagaagttgaaaaacgcgccgttatcgatgccactaaagttgccggtgcgcgtgatgcttatgtaattgaagaacctttcgcagccgcaattggtgcaggacttcctgtaatggatccaactggtagcatggttgttgatatcggtggtggtacaacagatgttgctaccatttcattaggtgggattgtctcaagtcgttcaattcgaatggctggcgataagtttgacgacgcaattatttcttacatccgtcaaaacagtaacctattaattggtgaacggacagctgaacaaatcaaattagcgattgcttcagcttcaccagaacgtgctaaagaagttgaatcaatgagtgttcgtggccgtgatttagtcactggtctaccaaagactgttgatattaaagcaagtgatattgccgaagcaattaaggaaattgtgacagcaattatcgatgctatcaaagaaacgcttgaagaaacatctcctgaaattgcagccgatgtgattgatcacgggattgttttaactggtggtggtgctttattgaaacatttaccagaagttatctctgatgctactaaagtacctgtcttcattgcccaagatccattggactgtgttgcagtcggtactggtgaatcattgaagaatatcgaagtcatgaaaaaaaattaagattagcgtaaaatagtgggacaaagagcggttagcgtttaagtaggcctaaattagtgattgattcaggtttttttgaatcaatcgcacaaggcccttaataaccggtttttgtcccatatttacgatattaaagatggatggtggcgaataaaccatgcaaaaattcttttcaaataaaaagttaatcattttattggtgacattaatcgtctgcatgggctttatcgcaatgtcagttggcttgcgtaatagtaagaagagtccaagttttatccgtcaattcggaaacgatgtgacaggcattacaaaccaagttgttagtgtgcctgctaatgggattggtaagggtgtcgatgcactgacagacttaattaatacttatcaagaaaataaagccttaaaagcacaattagatgatttagcacaaactaaggttcaagcacaaactttaaaagaagaaaacaagaacttgaaaaaagaattaaacttagcagggactttaacagactatacgacgctcaatgcttccgtgttgtcacgaaatccggataattggcagaattcactggtgatcaataagggttctctagcaggccttaagaagaatatgccagtgatgtctgaatcaggcattatcgggcggatttcagaagttaataagaccaacgctaaggtggaactcgtttcaagcactggtcgtaacagtaatggttttgccgcggtggttaataccaaagatggtaaacaagttaacggtattatgacgggctataattcagataagaaacaattgaaattaggtcaaattaaaaccgatacagctattgctaaaggcgataaagttgttacttctggcttgggtggtttaacacctaaggggctttatttaggtaaagtagcttcagttaaaaaggacgactatggtttggcattaactgtgtatgttacgccagccgctgatctgaataacttaacagttgtgacggttatcaaacgttcgattgaaggtgagtaatatggggacatttcgcttgaaacatcgctatttaatcccaatttacttactagtcgctttttacctggatggtgcgattagttcattaggggaacaatggctatatacgccagatcataccctaattagtcggttattcatgttaatgtttatcatggttgcgtttgttctacctgaagagacgaatttatcatggtatgcagtggggattggtcttttgtatgatttatattatacggggatgattggcatgtatctttttgtattgccactgattatttatatcgtgcgttacttaaaacaatacattccagattcaccattctttattgggttagtcgacgttatttgtttaacgttgttggaggtctcaatttatattatgaatcggctcgttaatttaacgagtatgacaccagttgatttcattagtaacgttttagcaccgacaattgcattaaacttagtcttttttatctttttgtatttgcctttaaagaaattattgctaaaattaaaatcagaacgatgaggggtttgatttttttatggatgcagtcacgttaagaggacgcaaagaaggattcgaattaaacattgatgctggtgccgattttgatcaagcattagattcaattgtcgcattattgagtaaaattcgctcagaacaacctaagttgggtaatgataagattgaacttgagttaacaactgggatgcgcttattaagtgaacaacaaaaaaaggcgctatatcaaacgctagaaccatttcctgagtttgatattatgagtattcagtcttcggtaatgacgattgagcaagcccaaattgaacggcaagaaaatagcattcatgttgaaccgaatgttattcggagtggacaagaagttaactatgtcggtgatgttttatttgttggtaatttacaccaaggggctgtcatcaaagcgacggggagtattttcattctagggtctgttgcagggattgtgcatgctggttttccagataatgcagatgcaatcgttgctggaaacctgacgaaagctgtccaacttagaattgcagatgcggttgaaattatcgatccaaagaaaacgccctttaattcacaaagtatcagctatattaacgatttacacgtcatcgattacggtgagataacggatttgaaacaaattaatcctaaattatatcgtaaaatggaggagcaataaaatgggaacagctttggtcatcacatccggtaaaggcggtgttggtaaaacaacttcgagcgctaatattggaacggcgcttgcgcttttggataaaaaagtttgtttgcttgatttagatatcggtttaagaaatttagacgttgtattgggattaagcaatcgaatcatctatgatatcgtggatgttgccaaaggccgtgccaaattacatcaagcgttgattaaagataaacggtttgatgaaaaactctatttattaccagccgcacaaaacacggataaagaagcacttgtaccagaagacgtgacagccattgtgacggctttaaaagaagaatttgattttgtcatcattgattgcccagccgggattgaatcaggttttaagaacgcaattgccggcgcagatggtgcgattgtagtcgcaacacctgaaatttcatcagtgagcgatgctgaccgggttgttggtttgcttgaagaaactgaaatgcaaatcgcaccacgtttggtcatcaaccgcattcgtcgtcatatgatgaacgatggtgaaacaatggacgtcgatgagattacaaaacatctgtcagtatcattgttagggattgtttttgatgacgacgccgttatcaagacatccaatgctggtgaaccgattgtcttagatcctaagaactcggccagccaaggttatcgcaatattgcccggcgcctattaggtgaaacagtgccattaatgacgttgaaagaaaagaaaatcggtttttggggtcgactctttggtaaaaaatagttgacttttcaagtgagaatcactagaataatgtcaatacttaaaacgttgaacggaccaaattagtttttaaggcacagagagctgaggtatggtgtaaatcagcccttcgaaactagtggcacatccgtgagttgattatctgaacgaagtaagataatccgttagcccgttatcgctgtagttttagaaactacataagtttaagcaatgtgagttgtttattaaactgaggtggcaccgcgataatattcgtcctcttggagtaatccgaggggacttttttattggtctaaaactagtagagttgtttgctgtgaagtaaacaaaaatctgaggtggaaccgcgattgatcgccctcttgacgtgtaaacgtgaagagggctttttttgtggcaatgtttagctaacacgctttgaaggatatgtttatataagggagattttatcatgcaatatagtttatcgattttaccagcgcttttgagtggcgctaaaatgacgttagctatttttagtttaaccgtgattggtgccattcccctggggttattattgagccttgggttattatctaaattcaagccactgcattatttgcttaacctgtatgtttggctaatgcggggaacgccattgctattacaattgatctttgtcttttacggcttaccggtgattgggattgtctttaatcgtttcgacgccgcattaattgcatttatcttgaattacgccgcttacttcgctgaaatcttcagagggggctttcaagcggttgatgatggtcaaatcgaagccgcatcagttttaggattaacctatccccaaaccattttaaaaattatcgtgccccaaacggttaaaatcgttttaccgtctgtcggtaatgaagtcattaatttgatcaaagattcatcattagtttatgtgattgggattggcgatttattacgggcaggaaacgttgccagcgcgcgtgatgttaatttagtgccattgctgttagtgggtgtgatttatctcgcattaactgccatttgtacatggttgttaggccgtttagaacaatattatcgttattaccgttaggaggacttatcgatgtttaaattagaaaatattaatcagtcattcaagggtcgccaaattttgaatgatttaaatttagaagttgaaacgggcagtattttagcaatcgtgggtcctagtggcgccggtaaatcgaccttgctccgcttaatcagtgggttggatcaaccagacagtggccggttcgtgatcgacggtgaaacctatgtcccaagtgccgctgaaaaagggggccggataggtgttgtcttccaagatttccgcttattcccgcatttatcagtgttagaaaacgtcacgttagcgcctaagatggtgaagcaattggctaaggacaaagcgaatgcattaggtcagcaattattacgccaattaggattaagtgcacaagaggcggcctatccgtttcaattatcaggtggtcaacgacaacgggttgcgattgcgcgcgcattagcgatgcagccggatattttgtgctatgacgaaccaaccagtgccttagatccatcgttagtcgctagtgtggcagaattgattttaagccttaaggaagacggcatgacccaaattgttgtcactcatgatattcaatttgcgaacaaaattgccgatcaagtttttgaattacaaccaaacgaggccaaccaatgatgagattaaagagattagcaacagctggtttattattaggcctattagtcagtctagcgggctgccatagccgccaaaagaccgatagttgggtaacgattgaacgccggcaaaaagtagtgattggcatcgatgatagctttgtaccgatgacttatcgtgaaaaaaacgggcaactaaccggctttgacgtcgagttagccaaggcgatttttaaaggcagtggcatccaggttgattttcaatcgatcgattgggatatgaaagaaactgaattgaacaatcaaacgattgatttaatttggagtggttattctaagaccgaagaacgggccaaacgagtggccttcagtcaaccctatctcacgaatcaccagatgattgtttcgatgaaacaaaacccagtgaatcgcttagcggatttgaagggccaaaatttaggcgttcaaaccggttcttcggggatggcacaactggatcgtcgaccaactgttttaaaacaaaaaattgccaatcaaacgccaatcctatatgatacctataacaatgcttttatcgatttgcaggctaaacggattaagggcatcttaattgatcaagtttatgctaactttgagattaaagcgcgggcaaatggacaagattttcaagtgattgagagtccttttgcggccgagaaatttgcggttggcatgcgcccggaagatcaaaaattacgacgctttattaatcgccggtatcaagtccttaagcaaaatggacaattagcgaagattcaagccaagtggtttaaagaataggatgcgacagagatgacgacgatgattatcataattcttagtctcatattagtaattaatacaatcggagcggtgattaccgtttttcgacaatcaagagatattgcggcgacttgggcctggctactcgttttaattttattgccagtgattgggtttgggttttatctcttttttggtaaaaaattatcagcagagcatctttacgatttgcggacgcaagcgaaactagggattgatgaacgggtgacgcaacaaaaagcggaattacggcaacgacgcaagcaaaaccatcattcatcgacaccggagattcaaagcttgattaatctctttttagtgtccaatacagctgttttgacgcaagaaaataaggtatcggtcttaacggacacaaccactgctcaagaacgactactggccgatatgagccgtgcgcgcgatcatattcatttagaatactatgctttttttgatgatcctttcgggcacatcttaatcaagacgcttgcctataaagcgtatcagggtgttaaggtccgcgtcatttatgatggctttggctcgcaaaaggtgccgcgttcatttttcaaaccgctagaagaagctggtgggcaagtaacgccctttttcagttcgcggtttcgattcattaattttcggttgaattttagaaatcaccgtcaattggtcgtgatcgatggtaatacggcctatcttggcaactttaaccaacatagtgttgatacgcatttaccggtccgagatacacgtttacgggtgagtggtgatggtgtcttgtcgtttcaatcacgcttttttatggattggaatgcggcaacgcaacgccaaaaggtttattacagtcaacattattttccaagttctgttgaacatggcaaaaccagtatgcaacttgtttcaggcggtccggatcgtgatttacctgaaattaaactcggttttttgaagttaattgcggctgctaaaaagcggttatggattcaaacccccttttttattccggatgattctgttttggcagcattaatacttgctattaattctggggtaaccgttaaaattatgatacctgaaaaagccaaacacagcttagtccaacatgccaatctttattatgctaggcaaattgttaaagcaggcggacagatctacctatacaaagcgagtgcttttagagcccggacaatgatggtcgatggccagctttcggctgtgggaacggctaatttggatattcgcagttttaaacttaattttgaaacgacggactttttatatgatccggcattaaccaacacattggaattaactttccaaaaagatttaaaagcgagtgtaccgcttactaaacaacagttaaacgcgcagacaactaatcagcggctctcgcaagacttggctcggttgttggccccgatattataaaagtagtcataaaaaggccctcgaaaaatttcgagggccttttttgatagtgattatttgaaatagttttgtaaaccggcgtaaacggcgtcggccactttttcttgataactgctactactgatgtaattaaagtcctgatcagaattgatatagcccatttccaatagaacagaagggcgttcgttatcgcgaagtacttgataattaccatattcaacaccacgattagttagtggtaatgatttaatctgattattcagcgcgttggctaagctagtgtctttactatttgagtaataataagtggttgtgccacttgcttggttagattgcgcgctggaatcaaaatgaatactgataaaggcatctgcacgtaatttattagaaagggcaggtcgaggggctaaatcaacgaatttatcagacgaacgagttaagaccacgttggcgccagcggcttttaacttcttagcaatcgcatcgacggtcttaagcgtataagtcttttcgtatttattgctatttgatagcgccccaacatcgttgccaccatgaccagcatctaaaacgatggttgcttcagaaagtgaggtagcacttgttttaacgacttcgttcttagcggaaggggtgacgacccaactggcgacataacccgtattgccatccgagtctttaaccttataccaagtgtcgctcttatcgagatacgttagcttcgtgttggcggaatagacttgagaataggcgtagttgacacccgggccgctgcgcaacttagtgttatctaattgcgttgttacggatttaatatcagaggtggactgactactactatcatctgttttcgtatccgtttgaacagctgttggtgcttcgttagaaatgctgatcaggtcactttggacccagccaacagccgaattatatttaacttggctccaaccgttttgttggtagagaaccgttaacttatcgcctttattgactttgcctaacagtaagctgctggcattgctgctttggcggacgttagcaaaagagttggtgaccgttgcgacccggttagaggttgcactgacttctgtattattaaccaaccaactggcaacccagccgattttatcaccacttaggcggacttggtaccagttattcttttgtgaaatgacgttcatcacttcgcctttgcttacctggcccattgtatcgtaggaaaggccgggtccttggcgcacattaacgacgtttgctttaatggtaatttgttggtacgttgcaaggacgtgtgtcgcgaagagaccgacaccaactagaatgaataatatgagaacggcaggataccgctttatccagttcaaaggtttttgcatatcttcaacacctttgtcatttatttataagagcttcatatggttcattatagcaaagatagtggatatctaaaggggttgacccttaaaaattagaaaaaattcaggaattattgacttttttttcaaataacgttaatctaatagcaacgagaatatgagatgaccagtgataaagtatggtaaacgcaccacttaacagagacgatttcaaagctgaaagaaattgacggtgtccacctgactgcttttgaggtctgcgtgtctaacacgccgttggctaacaacgttatgcttaagcaaaaattaaggtggtaccgtgcattcaagcacccttgttcaacaacaggggtgtttttttattgggtatctattggaggaatggaacatgggttatcaaaagccaaaaggcacagccgatattttgccaggagaatcagatcaatggcaacttgttgaaaaaacagcgcgcgacgtttttgcgcgttatcaatttaaggaaatcagaacaccattattcgaaagctacgatgtcttttcacgaagctcaggcgatacatctgatattgtcagcaaagaaatgtatgatttcatggataaaggggatcggcatattgcgttgcgcccagaaggcacagccggtgttgtccgcgcctttgttgaaaacaaattatatggtcctgaacatcaaaaaccttacaaggtgtattacatgggccctatgttccgttatgaacgaccacaatcaggtcggcaacgtcaattccatcaaatcggtgtggaatcatttggttctgaaagtccagcggtggatgttgaagtcatcagcatggcaatgcgtctattacgtgaatttaagatcactgatttgaaattagcgattaatacactaggcgatgctgctagccgggctgcttatcatgaagccttagttaactacttagaaccgcactttgaagaactaagtgatgattctaaggtccgtttacacaagaatccattgcgggttcttgatagtaaagatgcgaaggatcaagaaattgttaaagatgcgccagtcattcttgattatttaacggatgaagctaaagtgcatttcaatacagtgaagactttattggaatcattaaacattccatacgaagttgatactgaaatggttcgtggtttggattattataaccacaccatctttgaaatcatgacgaacaataaagtcttgggtcgcggctatacaacggtcttagccggtggtcgttacaatggtttagttgaacaattaggcggtcctgacatgccaggtgttggttttggccttggtgttgaacgcttattattattgatgaacgctcaaaatagtgacttagtagctgcacctgtgttagatgcctacgtggttggcatcggtgctgaaacgagtgcaaccacgctccacttggttgaaagtttgcgagaagctgggttgacagctgatcgtgattatttagatcggaaaccaaaagcccaatttaagacagccaataagttaaacgcccaatttgtggtaacgattggtgaatcagaattagctgataagacggcccacgtgaaggatatgactagtggggttgaaatcacagtgccattgacgacgctagaagccgattttgcagcagttaaaaatgaactaaaagcacaagaggagaatgcataatgaaaacaagaacaacttacagtggtttagttgatgaaacgtttgttggtcaaacagtcacattacatggctgggttcaaaaacgccggagtttaggtaatttaatcttcgttgatttacgtgatcgtgaaggtttagtgcaattagtctttaatcaagataatgctgatattttagcccttgctaacactttacgtaatgaatacgttattgaagtgactgggatggtgcaagctcgtgatgaagcggctattaacccagacatgaagactggtaaagtagaagtcatcgttagcgaattaacgattttaaacgaagctaaaaacttaccttttgaaattaaagatggcatcacaacttctgaagaaacaaaattaaagtatcgctaccttgatttacgtcggccagaaatgcaacaagcaattattcgccgttcacaaattacacaagcagcccacaaatatttggacaataatggtttcttaaacatcgaaacacctgatttaacacgttcaacaccagaaggcgctcgtgattacttagtgccatctcgtgtttatcctggtagtttctatgccttgccacaatcaccacaagtcttcaaacaacttttgatggatgctggctttgatcgttactaccaaatggcccgttgtttccgtgatgaagatttacgtggcgaccgtcaaccagaatttacacaaatcgatgttgaaacatcatttatgagtgctgaagagattcaagaacaagcagaaggtattatcaaacaagtcatgcaagatgttatgcatattgatgtgccaacgccattcaaacgcatgaaatggcaagaagcaatggatcgttacggttcagataaacctgatattcgtttcgaccttgaaattcaagacttaactgaaatgatgaaaacaagctcatttaaggtcttcagtgacactgccaatagtggcaatctggtccgtgcaattgtcgttccagaaggcgctgctaagtactcacggaagatgttggacgaacaaacagaatacatcaaacgttacggtgctagagggatggcctgggtcaaagtggttgatggtgaattgacaggaccagctgccaaattcttaaaagaacaagaagctgaattgcttagtgccctatcagcaaaagatggcgatttagtgctctttatcgctgataaattccaagtagtctgcgatagcttaggctacttacggaaacactttgcacatgacatgggcttagtggatgaatcacaatttacctacctttgggttgttgattggccattatttgaatatgatgaaggctttggtcgttggattgcagcacatcatccattcacacgtccaaacgatagcgatgttgatttattggaaactgatcctcataaagcacatgcgcaatcatatgacattatcttaaatggttacgaattaggtggcggttcactccgtatctaccaacgtgatatccaagaaagaatgttcaaggcgcttggtatcagtccagaaacttatgaagaacaatttggtcacttattaagtgccatggattacggtttcccaccacatggtggttttgccattggccttgatcgttttgcaatgttactcgcaggccgcgataacattcgtgacgtgattgccttccctaaaaactcacatgcttcagaaccaatgacgaatgcgcctagtcgtgttgcaccagcacaattagatgaactcggcttagaagttgaaccagaggttgaaaaggattaattaaatactcaataaaaagggctctccaaatggggagtccttttttgtgagcatattaatcgctaattgcggacatccgactataataataaccacgaaggagtgatggataatgagcgatgatttacgacaacaattaacaccagaacagtatgtggtgacacaggagaatgcaactgagatgccatttagtggtgagtacgatgaatttgatcaaccaggtatctatgttgatgttgttagtcatgagccgctatttagttccttagataaatatgatgctgggtgtggttggccctcatttacgcgacccattgttaaattaaatgaaaaacgagatcgaacgcacgggatggaacgtgttgaagttcgtagtcaaaacgccgattcgcatttaggccacgtttttacggatggtccgcaagaacagggtggtttgcgctattgtattaattcagcagccttaaagtttatccccaaagatgacttaaaggctgcagggtatggcgagtatctcgcattatttgaaaaggagggtcaataatggcaactgaaacagcaatttttgcaggtgggtgtttctggtgtatggtccatccgttcgatcaacaaccagggattcttaaagtggtctctggttacaccggtgggcacgtcgctaatccaacctatgaacaagtttgttcacatacaacggggcataccgaagcggttgaaattacgtttgatcccgcagtgatttcgtatgctgaactagtcgaaatctattggcgccaaacagatccaacagacgcgatgggccaatttcaagatcgaggcgatagttatcggccagtgatttttgttaattcagatcaacaacggtcaattgctgaagcatccaaagaaaaattgattgctagcggtcgctttaatgaaccgattgtgacacaaatcgaagcggctaaacccttttatcctgctgaggattaccatcaggatttctataaaaaggaaccttggcgagcagaattaggggaagtcaagcgaaaagccttcattcgagaaaaatggtcggattaattctaaaacaacctttagtattaagggtttgtgtgctagaatgaaagacattaaaacgaatgataggtgattattaagtggacgatctagcgcgaaaacatcagaatatggccaaagtttcggcggctatcttatatgggatttgtgtgtcaattgcattgaactttttctgggaagaaggcggcgtatacgcctcgggcattaccgggttcgcgcaatttattcataccgtgacggcgaagtttatgccatttctaccatttccattatcaacttccttgatgttattcttgctaaacgtaccgctttttgttttagcttggtttaaaattgggcatcactttacaatttatacgtttatcgctgttattttttcaagtttaatggttcaaattatgccattaacccaattgacggacaatccaattatctgtgcgatttttggggccgttattaacggttttgggaccgggatggccttgaaaaatgatatctcaaccggtgggttagatattatcggaattgttcttcggaagaagacaggacgttccgttgggaccatcaatattattttcaacgttgcgttagtctttgccgcaggctttatttttggctgggaacatgctttgtatagtatcttgagcatcttcgtcaatggtaaggtcatcgatatggtctatacacgtcaacaaaagatgcaagtgatgatcattacggataatcctaaagtcgtgattcaaatgattcaagacgagatgcgtcgcgggattacgattgtgcatgacgttgaaggggcttataaccgcgaagaaaaaacgatgttatttactgttatttcacggtttgaaatgcatgatcttgaaatggtcatgaaagaagccgatgaccgcgcttttgtcagtattacagaagcggttaagattctgggacatttctacgaaccaaaaattaaataactatcaaagggtcgtcaatattaaattgacggctcttttattttctgaataggcgtttatcggctaataaccgtgctctttttcgcttgctttttattctggtatctgtgacaatcgaagtaattatgatagttggaggtcacgcgatgttattaggtagtcacgttagtatgaagggtaaggaaatgctgttaggttcagcacaacaggcagcagaatttggggcaaatacattcatgatttataccggggcacctcaaaatacccggcgtaaaccaattgaagagttgaacattccagcagcgcaagcattaattgcagccaaaaacttagggccaattgtggtccatgcaccttatatcgttaacttaggcaatacggtgaaaccagaaaactttaaatttgcgattgaatttttacagcaagaagtcattcgagcggaagcgctaggcgcaagtcagatcgttttacatccgggtgcgcatgttggtgcaggtgcagatgctggtattaaacagattattaaagggttaaatgaaattttacgaccagatcaaacggctcaaattgccttggaaacaatggctggcaaaggaacagaggttggtcgtcgttttgaagaaatcgcacaaatgattgacggtgtcacactaaacgataagttgtcagtaacgtttgatacgtgccataccagtgatgcgggttacaatattcgcgaggattttgatggtgttttaaatgaatttgatcatattatcggtttagaccggcttaaggtgattcatttaaacgattctaagaatccacaaggggcgcataaagatcggcacgctaatattgggtttggtgaaattggctttgacgctttacatggtgttgtaacccatccgcagcttgttgatgtccctaaaattatggaaacaccatacgttggtgaggataaaaaacataattttgcgccatatgcatacgaaattgcgatgctcaaaaagggtgaatttgacccagatttattaacgaagattgagcagaatgaaggtcgattatgagattgaaacgttctcgctatctttggctagcgctaatcgttttaccggtattgttattgctagttaaaccggtgcaagcagccgatacgtatgatattagtcgctatcatgttcaggttaacgtccaaaaagacggtagtgcacaagtagagcaaaaaatgaattttgatatccaagatgatattaacggtatttatctcaatcaaaatttacaaacaacagttggtgagcctaaaaagttggtgcaaccacaagtggccgttaatggccggactttccaagcgagtcaatccgaaacggcgggaacgtattcgctaaccaatgataatcagaagtatcgcttcaagctctaccaaccagcgacagaagatgatcggttagcagtcactttgaaatatcagttacaaaatctgattattaattatcaagatactgctgaattgaactggaaagtgattggggatgcctgggacagcagtctgggtgatgttcaagtcacgattcaattgccaacaaccctgaaacagtctgaattaaagtcgtggacacatggcgatttagatggccaacagattgttgatccggcaaaagggcgggttaccatcaaaatgacgaataatccagccaatcaatttgttgaatcccatcttattttcccaacttcagttaccccaactaaccccaatcgggtggctaaaaagcaacgggcaaccattatcgcacaagaagcgaaacgggctgaagaagccaatcaagctcgtcaggcccaagaacgatggtattgggtactttcggtaattgcggtggtcttagcgccggtcttattgctagtggtttggtatcgggtaaaacgggcattgcctcggatgcattatcagggtcatgcgccagaacacgtctacgatttaccagatgacaatggtccagccgttatccgttatctattagcattgccaatgacggaaaaagcaaaggaagaaagtttatcagctaccattttagatttggtagcccgaaagaatatcacaatcgatgtccaaacacctgaaaaacaggtttttagaaaagcaaaaccacaattcacgttaactttattaaatcgcaatcgattatcacgttctgagcaaaaattagtgacttggttattcgatgtcattggtaacggacaacaggttagcctttttgaaattgaaaagtatcctaaacgccatagtgaaaaagtctttaatcaacattatcatggttggcaaatgacagttgaagatgaagccaatcaaagtggttggctacgcgagcgtgtttttgccgttgcaactagtttaaattattggttgataggacttggtacactaaccgtgattttaatgctagcagcgttaatcgaagtcgtcgcttggtggacgattttaccaatgttgttggcctttcttctgacgggctggcagaggatgcgattgcaattatggacgcaacacggttatgaaaaacggggcgagtggttaggttttaaacagatgttgaaagatatttcgacacttgatatggccaatgtaccagacgtgatgctgtgggatcgttatctgagttttgcaacggcgttcggagtagccgataaagtggttaaagcgctcaagattaagttgactcctgagcaactacaaacaatgccattaggttattattattactacggctatactggtggcctcaatattggccaatcctttacaagtgcccttagtagtagtgtgaatagtgcggtgagtgcggctaatccaactagtgttagtggtggctctggcggattctccgggggttcatcaggtggttttggtggcggttccggcggcggtacattctagcaaacaaatgattatgatattcccgttaaacgtggtatgactatatggaataaatacaaagtataagtgataccggtttaaaataaggaaggcaccaatatggaattcaacgatgttattaataacagaaagtcaatccgctcgtttgatcctcacaaaacagtatcagatgaattaattaaaaaaattattacctcagcacaacgcacaccgtcatggacgaattcacaaccttggcgagtttacgtggcaactggtggaacacttgctagtatcaaagcagatcaccttgaacggacgcaaaataaggttaagggcaattctgatttagcagtgattcatcgtgttgattggggtcaggcgatggctgaaaatagtcgggtgtggaatgctgaaatcagtgattatttgggcgaagaaggtttagcagcatttagcgatttacaaatgcatctttttaacgcaccagccgttatctatttgacggttgaacgcaaagtctcaccgtggatgatttatgacatgggtgcttttagccagtcgattttactggcggcggctaatgaacaggtagacacaattccggcttacgaaacagctaaatatccggatgcaattcgcaaaattgtgggtactccagacaatgaagtaattattggcggcattgcgatgggttatcgcagcgaaggaaagattaatcaattccacgctaaacgaagcccactggatcatttcttgacgattaaacattaaaaaaggcctcggacaaattaaatattgtccgaggtcttttaattgggattaattaacgtgatctgtcgagctgcttgcaaagtccaagccagtttgttcgagaatgatagccgctgtttcttcgattgagcggttggcgacgttgatgacttggcaaccaattttatcatataaatcttgtgcgaagtctaattcagccttgatttcatccatgtcagaataggttgtgtcgggatttaagccataggcaatcatccgttcacgacgaatgttatttaaaacttcaggtgtattcatcaaaccgataatcttcttaggatcaacatgccatatttcgtctggaatgtgcgcctgtggcacgattggcaagttggcaaccttgatgttccggttcgctaaaaacagcgacagtggcgttttagaggtccgagagacccctaacaagacaatgtctgcctctaagaagccatggggatctttaccgtcatcgtacatgacggcaaattccattgctgaaatccggtcaaagtaacgatcgtttaaatgatgaagtgcgccagcctcaccggatggggctaaacttgttttagcagtaattaattttgtgagcgggctcatcatatcaaatgacgcaatttttttagcatcacagtaattctgcgcgatttcagaaaggccggtcgttgctaacgtatgaacgacaattgtttcttccggaacagccttacttaaaacgtcggttaatttatcaacggaatgtacaaatggaaaacgaataatatcgggtttaacgtttggatattgcgctaaggctgcttgcgcaagttgtaaagcggtttgaccaactgaatctgagaggacaaaaaccgttaagggggtagactgtgacataataaaactccttttcgcacttttatagcgctatcatatcatatttgggcaaaaagcggcgatatttaaaaaaagttttaattaattgcccgtgggttattgaccgtattttcaacattcgctataatagcaaagaacagtttatgtgaaacccattttttgggtgcgcgtaaacggttatacttagcacgcgaggggagggatatcatatgggcaagacagtcgttcgcagtaacgaatctctagatgatgctcttcgtcgcttcaagcgttccgtatcaaaagctggtacaatacaagaatatcgtaaacgtgaattttacgagaaaccaagtgtaaaacgtaagttgaaatcagaagcagcaagaaaacgtaagaaattctaatttcttcataaaggaaatgattgaatgagtttacttgaacaattaagttctgatttgaaaacggcgatgaaggccaaggataagttgcgactaacagttattcggagtttaaagaccgctttaactaacgcaaaaattagtgcagggcaagacttatcttctgacgaagaactaagtgtattatcatcacaagttaagcaacgtaaggattctttagctgagtttgaaaagggcgatcgtgcagatctcgctgaacaaacaaaagcagaaattgaaatcgtacaagcttatttaccagaacagttggatgaagccgctgtgattttaattgttgatgaagcaatgcaggcaacaggagcgacaggcaaggctgactttggtaaggtgatgcaatatgtaatgcctaaggtcaaaggacgagctgatggcgcaatggtcaatcaagtcgttaaatcaaaattgagttaatttttggtaggacttcccgcgggaggtcctactttttttgtggcaaagacgtacttaaacaaggaaatcagtcaattttccccctttgtgattataatgtcgttataattgaataaatagcgcggttgtctgcttttaaaaccgggcttgattgtgatagaatgaatgtagttttcatcttgaaaggatgaatcgtgctattggaagttggttttgacactttcaaggcagtttgattttgaaatgtatttagatgaataaactcatttaaacattctgagaggggtttactttttggctgaggtagaagagcgtttatttcaattagcgacgcctaatttggcagctgctttgatgggggcacacgatcactttttaaaaatcattgaagaaagtctaactgttgaattgattgcgtttgatgatcatattacaattcggggtactcagccgggattaagacaagcgaacgcggttttagagagtctagttgcgttattacaacacggcgtgatcctcaaggaaacagatgtagtcagtgcgacgaaaatggcgctcaaagggacgttaaatcaatttgaggccctttatactgaaccgctcatcaatgaccgcaaaggccaaccaattcgtgttaagacgtttggacaacggcaatatatcgatgcgattcgccataatgatgtgacgtttggcattgggcctgccggaaccggtaaaacgttcttagcagtcgtcatggcgattgctgctttgaaaaaaggaacggttgaacgtattattttaacgcggccggcggttgaagccggtgaaagtctcggctttttaccaggtgatttaaaagaaaaggtcgatccttatttacggcccatctacgatgcactctatgcggtgttgggcaaagaacatacggaacgattaatggaccgtggcgttattgaaattgcgccgctggcttatatgcggggccggacgttggaagaagccttcgttattttagatgaggcccaaaatacaacgccggctcagatgaaaatgtttttaacccggttaggctttaattctaaaatgattgttaatggcgatatcagccaaattgatttacctaataaaacccagagtgggttagtacaagcggaacaaattttgcgcgacattcctaaaattagttttgtacaatttagcgcggaagatgttgttcggcacccagttgtcgcgagaattattaatgcctatgcggcaatggataagacgagaaagtaggacgaatgaatggatattcaaatcatcgatgaaacaaaaatcgtaccagaagcacaaattaaattggtggaagatgtattagagtttgctggtcaaaagcttgaattagctgaagatacagaaatgtcagtcacgtttgtgaccaacgaacgcattcgccaaattaatcaagaataccgtaatacggatcgtgcgactgatgttatcagttttgcaattgaagaggatcctgaagaagaaggcttacctgccaactttgaagaattgtttgatattcctaagaatattggggacctatttgtttcattagaaaaagccgctgaacaagcagaaacttacggccattcattcgaacgtgaattagggtatacgatggtccatggtttccttcatttgaatggctacgaccacatccacaccgaagatgaagttaaaatgattcctttacaggagactatcttagatgaattcggactcaaacgctaaaaagacgcagacggataaaaatcgtaattttaatcaatcgacacatcacgctttagatgggattatcaccgcttttaaggaagaagctaacctgagacgtgattttgtgattgcgatggtcgtgctagtagccggttattttgcccgattacactatctagattggctatttttgattttagcgatttttatggtgttgctggctgaattttggaataccgtgatggaacactttgtcgacttattggttgatcggcagtttcatccactagcgaagaagattaaggatatcagcgctggtagtgttttaattggcgcgtgtttagctgtgattatcggttgtgtcgtttttggacacgcggtgctttattatttttaaaagagattaattaagatttaaaaaaggggactattatgtcagatacttatcgctcaggctttgtggccattgttggccgaccaaacgttgggaaatcaacatttatgaatcgaatgatcggtgaaaaaatcgccatcatgtcatcaaaggcacaaacaactcggaacaagattcaagggatttatacagatgacaacgcacaaatcgtgttcgtggatacacctgggattcataaaccacataacgaattagacgaatacatggatcaagcagcactttcaacatttaatgaagtcgatgcgattttattcatgattagtggcgttgataagaagggccctggggatcaatacatcatggaccaacttaagaatgttaaaaagcctgtttatttggttgttaacaaaattgatgccattcacccagacgatttattaccaatgatcgaacaatatcgtcatgaattagacttcaaggctgtttatccaatttcagcattagaaggcaataacgtgcccgaaatgttaaaagaacttgaattaacattgccagaaggcccacaatactatcctgaagatcaattaacagatcacccagaatatttcgttgttggtgaattaatccgcgaaaaaattctagaattaacccacgaagaagtcccacattcagtagccgttgtggtcgaacgaatgaaagaccgcgtcaatggtaaacttcaaattgaagccaacatcattgttgaacgtgatggtcaaaaacggattattatcggtcaaaaaggctcaattatcaaagaaatcgggattcgttcacgtcgcgaaatcgaagctcttttaggcgaaaaggttaacttgaagctttgggtcaagattcaaaagaactggcgtgataataaccaatatctccgtgaatttggttacaataaaaagagattgtaggctttaaagatggcggaacatcgatttgaagactttaacggtctagtgatgtatcgaaagaattataaagaaaaagatatgttggttaagattttaaccgatcgttttggtaaaaagatgttttacttgcgtggggccaataagcctaaatttcgtctaagtgcggctattttgccgtttacgcaggccgaatatggcggcgatattcgcgatgatggcttatcatttttgaataatgtgaagtcagccacgcaatttcaaacgatcagtcaggatttatttttaaatgcttatgcgacttatatcctgaacttaattgatgtcggctttccggacagtgaaccattaggcatctggtatgataaggttgaacaggcgttaaatctgattgatgaaggttttgatgcggcgatgattacccatattattgaaattcaattactacaggtgtttggcgtccaaccgcaattacaaggatgtgccgtttgtggccgaaccgatttagcgtttgattactctgagagttatggggggcttttgtgccaacgtcattggcatttagatcccaatcgtttccacagtagtcagcgggcaatctattatctccgattgttttccgtgattgatctgtttaagattcaatcggtgaacgtgaaggaagccactcaggtcgaactcaaaatgattattgaccgactctatcaagatactgtgggcctgtcattgaagagtaagcaattcatcgacaagatgtacagtttcgatagtcaattaccacaattaaaaaaagtgccgtcagaaattgacagcacaccaaaagacgactaaaatagtaatcaacttaatagacgttgaagaaaagggtcccttgaaacggtcagacagtgattctaggtgagtgagaactagaacaagttttaagtggattggcatttcggagtcataccaatgaagcagcagctcgctttgagctgaagtagggtggaaccgcgagaaatcgtccctatgtgactaactgtcgcataggctttttttatgcgcaaataacggaaaagaggaattgaaatggttaaaaagttgaatgttcaagaaatgattttaaccttacagcgtttttggtctgaaaaaggctgtatgttgatgcaatcttatgatacagaaaaaggggccggcacaatgagcccttatacgttcttacgggcgattggaccagaaccttggaacaccgcttacgtggaaccttcacggcgtccagcagatggccgttatggtgaaaaccctaaccgtttattccaacatcaccaattccaagtgattatgaaaccagcacctttaaatattcaagaattttatttggatagtttacgggccttaggaatcgatcctttagaacatgatatccgttttgttgaagataactgggaaaacccatcaatgggctgtgccggtgttggttgggaagtttggttagacggaatggaagtcacacaattcacatacttccaacaagttggtggtttgcaatgtgaccctgtcacgagcgaaatcacatacggtgttgaacgtctcgcttcttacattcaagatgttgataatgtttttgatcttgaatggggtaacggcgttttatatggcgatattttcaaagaaccagaatatgaacactcaaaatacgcctttgaagatagtaatcaagaaatgcttttgaaattctttgatgaatacgaaacagaggccaaacgtttaatcgatttaggtcttgttcacccagcttacgattacgtcttgaaatgtagccatacctttaacttattggatgcacacggtgctgtttccgttacagaacgggccggctacttgtcacgcattcgtcggatggcacattcaatcgcgcaagcattcgtcgctgaacgtgaaaaacgcggattcccactattaaaacatgcacaagaagcaaaaacggaggtcgtagatcatgactaaaccattcttattagaaattggcttggaagaaatgccagcccacgttgtgatgccaagtatccaacaattagaaaaacgggtgcgtgacttcttagaagaacaacatcttgaatttggtcaattaaaaacttatgctacaccacggcgccttgcaatcttgattgaagacttagctgacaaacaagctgacattcacgaagaagcaaagggccctgctaaaaagattgccctcgatgctgaaggtaactggagtaaagcagcccaaggtttcgttcggggtcaaggcttaacaacagatgacattacttttaaagaattaaaaggcgttgaatacgtctatgttgaaaaatcaattatcggcaaacccgttgaagccattttaccggagttaaaagccgtcattatggcgatgaccttcccaacacggatgcactgggctgattacgatttcgaatatattcgcccaattcactggattattgcgctattagatgatgaagttatcgactttagtattctaaacgtcacaactggccgcacaacgcaagggcaccgtttcttaggccaagaagtgactttggctaaagcaactgactatgaagcagcccttgaagcccaattcgtgattgctgatgaagctaaacgccaaaacttaattcaaacgcaaattgaaaaaatggcgcaagaaaacgactggcaagttgatttagatgctaacttattagaagaagtgacgaacttagttgaatggccaaccgctttttacggtcaatttgatgctaaataccttgaaattccagaagaagttctcatcacttcaatgaaggacaaccaacgttacttctatgcacggagccaagctggtgatttattaccagtctttatcggcgttcgtaatgggaacgacgctttcatggaaaacgtgatcgcagggaacgaaaaagtccttacagcgcgtttagaagatgctgatttcttctaccatgaagatcaaaaagtaaccatcgctgaaaacgtcgctaagttacaaaacgtttctttccacgataaaattgggagtcttgctgaaaagatgacccgtgttggtttaatcgctcaattcttaggtcaaaaattcggtttatctgaagctgaattagttgatttacaacgtgctagcgacatctataaattcgatttagtaaccggcatggtcggcgaatttgctgaattacaaggtgtgatgggtgaaaaatacgcgctattacaaggcgaaacacctgctgttgcgactgctgttcgtgaacattacatgccaatcagtgcagaaggcgccttacctgcaacgaaagtcggtgctgttttagcaattgctgataagttcgatagtatggctgatttcttcgctgttgggatgattccaagtggttcaaacgatccatacgcattgcgtcgtcaagcttacgggattgtccggatcttagaaaaccaagactggcacttcccaatggctgatttccaagcagctatgagccacattgttaagcaacaagccgatttcgatctagattggtcagccaatgcagctgccatcagcgatttcttaacgggtcgtgttcgtcaacgctttaacgggatgcgtcctaaggttcgtcgagacatcgtcgacgctgtcttgaaaaaccaagggcaagacccagttgtgatgtttgaagccgctaaagtgctctcagcacatcaagatgatgctgatttcaaggcaacaattgaagctatcacgcgtgtcttacgtttagctgaaaaagttgactttgaaacaactgatttaacggttgatccagcgttatttgaaaacgatgctgaaaaagcactttatacagcagtcgaagacttacgtggcgcaacagcgacaaatacgttagctgaaaattatgccgcgttacaaacactacgtccattaattgaagcttacttcgatgccacaatggtaatggctgaagatgaagccgttcgtcgtaatcgtttgacacaactcatgattatcgctcaaatcgcgcttagcttaggcgatttaaacgaattgattgttaaataagcaattcaaaaggggataataaacatgttacaaatgaaacgggtttatgaagcagccgccgattctgacggttatcggatcttggttgatcgaatttggccacgggggatttcaaaagaacgcgccgaaattgagacgtgggctaaagaaattacacccaccactgacttacggaagtggtttggtcatgaaccagctaagtttcccgtttttaaagaaaagtatcttgctgaaattgctaccaacccggattggccagaattctgtcacttagtgcagcatcaattagcgcttggtgatgtgacgctcgtctacgcggctaaagatccgcaatataaccatgttgtgattttaatggcacttttaaaaaagacgcttgacaagtaataaaaatgtttgttatatttatttgcaactacacctaaatggtgctatgatatatagtgtatttttgtgctgataatcctaagagtcgcatttcattgtgaggtgcggcttttacagtcttagtacaaattgaagtgaattgtgaggtgagaccaatggcgggtaagattccgaacgaagtcatcgatgagattcggagccagactaatattgttgatgttgttggtcaatacgttcaactcaagaaagccggcaagaacttatttggtgtttgtccttttcatgatgagaagacaccatcattttctgtgagtgaagagaaacagattttccattgtttttcttgcggtcgcggggggaacgtcttcaagttcttgatggaattggaacaaattagttttccagaagcactgacgaaggtcgcagattttgctggagtgacattggcggatagttataagccaactgctgttcatcgcgaatcaagcgaagttacacagtttaagcaactctatcaacaagccaacgaactgtttaagcatattttaactagtacggtggctgggcaaccagcgcttgattatttacacgaacgacagatgaccgatgcgttaattgagacctttagtattggttatttaccggatcaatcggatctattgttgacgtttttccaaaataaggatattccgtatcaggtattgcgccaatccggattatttattgaaacacaaacgggtaagttacacgatcgtttttctgggcgggtaatgtttccgattcgaaatgcgcaaggtgaggtcatcgccttttccgggcgggttttaaccaaacagccggatcaaccaaaatatttaaatagccctgaaaccgtgatttttaataagcggaaagtactgtttaactatgatttggctaaacaaattattcatcaatccaaaaaagtttatctttttgaaggctttatggatgtgattgcggcctattcggcggatgtcgtcaacggtgtcgcgtcaatggggacgagtttgaccaccgagcagttgaatctgctagcgcaacaagcgcaggaattagtggtgtgttatgatggggatcaacccgggattgaagcgatgaaacgggcgattaacctattgcaacagcatacgacacttgaattgagcgtcgtggtcttaccaggcggcgtcgatccggatgagtacgtccgtcaatatggtagtccgcaatttaaggaaaccttgcaaaatgggacggaaacgcccattgcgtttgaactacgttacttgaaacaaggtttaaacctcgataacgagaaggatcagcttgattacgtacaacaagcattagaagttgtggcgcgtgttgagtcgcctttagcaatcgaagtttacttgaaacaggtcgaagccgatagcgggattacactggatacattgaagcggcagttacaaacggtgcgggttaaacatgccacgcaagtccccatcaatcaagtgggacaaccggaagcaccgccatactttgatgattttcaggcaccaccgctaccaccagaagaaatggccggggcttttggcgatccacggacgattgcacccaagcggcagcctaaacggttaacgcggattgagcatgctgagcaagaaattttgcacatgctgattcataatgaagatgtgcgtttacaactcgaaaataatgcagactttagctttgtgcataccccataccaactcttatatgagttatggcggtccttcatcgcagaagggcaatcggctgatatagcgggtttcacgagttatattccagatgacttgcaagaactagtcgttcagattgatctgcttgatttacctgaagaggctaatcaagaagcgttgaacgattgtttggcggttatcgggcaaaattcgattcaggaacgtttaaaagaagcaaaaatcgccttaaaagaggcaactaaattgggcaatcatagtgaggagctacggttaactaatgaagtgatacaacttgtttcgcaaatgaaatgagatattaactaggaggtttctgaatggctgacaataaaaaagctgatacgaagaaattagacactgcggttaaggccttaattaaggaatacaaacccaaaaaagaaatcaccaatgatgaattagtggcaaaaatcgttaaaccatttgcacttgaagcagatgaaatcaacgaattaatgcaacaagtggaagatcacgggattgggatcgtcgatgaagacgggaatccaagtgctgccacattaaaaaaagaaaaagtttctgctaaagaattaaaagatatgtctgcaccaactgggatcaaaatcaatgatcctgttcggatgtatcttaaggaaatcggccgtgtttctcttttaaatgcgcaacaagaagttgacttggccttgagaatcgaacaaggtgatcaagaagctaaacaacgtcttgccgaagctaacttacgtttggtggtctcaatcgctaaacggtacgtcggccgtggcatgcaattcttggatttaatccaagaagggaacatgggcttaatgaaggctgttgaaaaatttgatcatcgtaaagggttcaagttctcaacttacgccacatggtggattcgtcaagcgattacgcgtgcgattgccgatcaagctcggacaattcggattccagttcacatggttgaaacgattaacaagttaatccggattcaacgtcaattactccaagatttagggcgcgaaccaacgcctgaagaaattggggctgaaatggatatgaacacggataaagttcgtgaaatcttgaagattgctcaagaaccagtttcccttgaaaccccaatcggtgaagaggacgactcacacttaggcgattttatcgaagatcaagatgcaactagtcctgaagaacatgcttcttatgaattgttgaaagaacaattagaaagtgtcctagacaccttaacagatcgtgaagaaaacgtcttacgtttacgtttcggtcttgacgatggtcggacacgcacattagaagaagtgggtaaggtcttcggtgttacgcgtgaacggattcgtcaaatcgaagccaaagcattgcggaaactacgccacccatcacgttcaaaacaattaaaagatttcttagaataaattcaaaaaaacggtcatctaaaaagatgaccgtttttaatttggacaatacttcaaataataaatcttatgtcaactagatgtatctttcaacattaaagacactgatagagcgtttgctaaagattgaaaatgccccataacccaaagccaatcatcatgagtgccattaagcctcctgagtacagggcaatcggcatgaagtacgaaacgttgcgattggcctctgtttttaaatacttgaaagtatttagagttgcgtaaacctgatagagaccgagcattaaaaggacaacacttaagaagagagacataggacaacctccaaattattatttaaagcgctttctttcatttaactagagtatagaacggctgggatgattatgcaacctttaacgacaatcaatattcataatgagacgattgtctgatgcgagcttagtctgctttgacgctcaaaatttggtatactaactgtaacaatcaaagtttctagaatggagttttatttttgtcaccaattaatttatcgaaacgtttagctgcagttgcgcagttcgtcccacaagatagcatcgttgctgatatcggctcagatcatgcttatttaccaatctggctcacagagcaaaaacgattaaagggggccattgcgggtgaagtggttgctggaccttttgaatcaacccaaacacatgtgatccaatggcacttagaggaccaaattcaagtccggttaggtgatggtgtcgaagtgcttaaccccgaagaagaccaagtcacctgtattgtgattgcggggatgggtggtctattgattactgaaatattggaacgtggcttagcgcatctaaacgggcacgaacggttagtcctacaacctaatattatggaacccaccgtccgggaatggttaatgaatcaccactacgccattgtagaagaagcaatcgttgctgaagacggtcatatttacgaagtcatcgttggtgaaccaagaactgaggctgttgaactcgacgaagctgacttagtattcggcccagttttacgacgccgtcaaccggcagatttccaattgaaatggtcaactttattaaataagaaacgccatttattggtgcaacttcaaggtgctcaggtcacgccaactgaaaaaattgctacagtgcaacatgaaattcaattaattgaggaggttcaaacatgggacaattaatcgcgagtgacttgattgcggcgattgaagagtatgcgccattagtgcttaaagagggtaatgatccaactggttttcaaattggtcgccgtgataaggtggttaagaaggtactcgtcacattagatgttcggccggaagtggtccaagaagcgattgataacgagattgattttatttttgcccaccacccagtgatgttccgacctgcacgcaatcttgatctaagtgatccgcaaaataagatgtacgctgatatactgacgcatgatatgacggtctatgcagcccataccaaccttgataaagcgcaaggtgggatgaatgattggttggcagcagcgttagcacttaaaaatgtgcaaccgttcaacgtgactgattatgaagcgctaatgaaattggccgttttcgtacctgaaacacatgcggatgtggtacgccaagcgttagggcaagctggtgccggtgaattaggaaactatcaaaactgcagttttagcgctgaaggcaccggtcgttttgaaccgcaatctgcagctgatccgtttattggccaagctggtcaggcagaagtggttgctgaagttaagatcgaggttattttaccagcagctaaaaagaaccgcgtgttaaaagcgatgcttgcggtgcatccttacgaagaaccagcgtatgatttaatcccattggctaatcaacaacaacctatcggaatcgggcgtattggtcaagttgaccaaccaatgacagtccgagactacgcccaatttgtttgcgaaacgtttgatttaaccggtctccgcttgatttcaaatgaacctgataaattagttgaaacagttgcagtagttggcggtgatggtggtaagttcttccccgctgctctgcaagctaaggctgatttgtatattactggtgacgtttattatcatacgggccatgacatgttagcagccggattatccgttatcgatcctggtcatcatattgaaagcattgtaaagactaagatgactgcgttatttgaagaatggcgtcaaataaacgattgggaagttacttttattaaatctcagcaaaaaactgatccgtttacatttatttttaatgcgaagtaggttagaatagaattagtattaaataatatctaggaggcttcaccatggctaaatatgaaaaattaattccgcgttttctagaatatatcacaacagaaactcgttcagacgaaaatgcgacgacgattccatcaacacaaacacaagtggttttcttacacaaattgatggatgacttgaaagaaatcggcttaagcgacgttaagtataacgaaaaaaacggctatgttacagcgttattaccaagtaatatcgataaaaaagtgccaacaatgggctttttatctcacgttgatacagcagatttcaatgccaagggtgttaatccccaaacaattgaaaattatgatggtgaatcaattatcaaattagacgaagctggtcaatttgttttagatcctaaagaattccctaacatgaaaaactacaagggccaaacattaattacaacagacggctcaacattattaggttcagatgataaatctggggttgctgaaattatcacagcgatggattacttcatccaacatcctgaaatcaaacatggcgacatcaagattggtttaggaccagatgaagaaatcggtacaggtgctgatcacttcgatgctgaagattttgcaacagacttcgcttatacaatggatggcggcccaattggtcaacttgaatatgaaacatttaatgcagctgcaatgaaagttgatattcaaggtaaaaacgtgcatcctagtgaagctaaagacatcatgatcaacgctttacaagttgctgttgatttccaagatgctttcccacgcgatgaagtgcctgaaaaaacagatggccgtcaaggtttctatcacttattgagcttagacggtactgttgatgaagcacacatggcatatatcatccgtgattttgatcgcgatggtttagaaacacgtaaggcatttgctgctaaagtggctgaagacatgaatgctaaatacggtgaaggtcgcgttaaagcaaccattaaagatcaatattacaacatggcagaagtcttaaaagatcatatggatgttgttgatttggctaaggacgctatggaagcaatcgatatcaaaccattaatcgaacccgttcgtggtgggacagatggttctaagatttcattcatgggaattccaacaccaaatatctttgccggtgctgaaaatatgcatggtcgctacgaattcgtttcagttcaaacgatggaaaaagcggttgatacaatgattaagatgaacgaattaaacgttgaaagaaactaaagatataaaaaagagtccaacaattcaatttgttgggctctttttatgcttaatttaagcttgattagttgtcagtaaaccttttagttgctcaattggtagttgaccgggcgcgctaggtgtttcgagatagccaaaactgatagctgagccaaattgaccgccaaagattcgcgaggcgacaccaaattcagacattgccattgtcgtcaatggtttatcgaattgatgcgtaaaactttgagtggctgctaacaagcgggttgtatctgctggtgattgggccgtcgtcgctaatttcaagaggtccgcatcaggatcggcttgcatggctaataattgcgtgcgcaaggtatcattatccggtgtttgaacggtatcatgatgactcaaaagcacttggtaatgctgttgatgggctaattcagccaattgatgacgttgctcggctgctagtgaccactctaaatcgattgcttgaccaatatgggctttgatcaagggagcgtagtaggtgaggtagtcttgagctgatgctaagccaccatcgttagtggttctaaccgttaaaattaagggcaaatcaagcgcggctattttttcagcagcggtcaatagttgtgcagaagcttgccaataatcaaggcgccattcgagaatatcgatggcgtcttttttttgattgatgaggattagttcgcgcagacagtcgtccaaatggcgtggcattagggaaactgccgtttgggtttgaccggtagtaaactcgaggtgcatttcaaaaactcactttcttaaagagattgatcgatatggttgacgagatattgtccgtcaacctgtttgaattcccagatttcgctgaaacgttcgatataagttgcttcacggcgtttttcattgtcttcgtctgataagcgatcattagtgaaataatcgcgcatttgggccgttacaaggactttacggacgtttggattgtccgataggatcagttcctctgagatgatggtcagactttccagctgattgtgtttgtgttggcgttgataacgatttaaaatacgttgttgctgccgttggaaatggggggtcatgagcggtgcgaccaaactaagatcattggtggtccaagcggcttcaatttggtaaaagcattcttcaaaacgttcgcgggttgcatcgtcaatcgtgacggttcgtgatagtgcccgttcgtgacgccgcgccagccagtcgcgtttcttgcggataatcattaggaaggctgatatgataaaaaaaattgcaaaaacgaggttgttgagaaaactacggggcccgtagtaaccccggcgaccgtaataattgttcgttgttctgtcggtggtcgtacttgtgctgccacgaaacgaaccactagaggttgaaccaccgccaccacctgaagccccaccggctcttgcataggtagcagttggcgctagacagatgagacttaataataaaatgaaactaatgattaattttttcatattcgacctcgctattaaataacattagtcactattttagaggaattaatgggattaggcaatttaaagattagtaacgtttaatcttaacattaaaaaaagagccgggattttatcccaactcctttttatgatcgtttaaacttttaacgatgagcaatatcgatttctgcgagccaagttagcgcaagcgggagccactgggcaaccggttcattaacgtcttgtggtttaccgggacgctgggttactttattggccaatgccaaaccgtgaacaccatcgctgaataagtgatactcagttgtgatgtttagccgatttaattcagtgacgtacagtaatgaattgatggctggtacgagttcatcagttgccgtttgccatacgaaacacggtttggcccattttgttaatgtgtcctgtgcgtgccagagacgttgatcggttgtaatccgctctttttcactttcttctttaggaaaaccagcgtctaaatcaatgacaggatagcttaaaataactgcggcatggtggccacgataactgtcgagttgatattgtgtgttcagttcagggttagtagcgataccgttaaaagtagccactagatgcccaccagctgagaaaccaacgagtacgattcgttcgggatcaactttttgagtatctgattgatctgtaatccactcgatcgttttagcgagctgttggagcgctgtaggataaaccatttggtctggttcgatgagttgataaggtaagacaactgcgtgacagccttcagctaatgcctttaaggcaattggttctgtttcacgctgtgaatggtagcggaaaccacctcctgggcagataatcacgaccggttgatggcgagtgttgttaaaatcttgattggaatctagccagtaggctgtaacttgaaagtcctggtgattcgttgtgagcgtttgattcataatttgcatagatagacagcctttccgtctgaataagcgaagcgctttcagttgatgcttttattttactttaaataaataacacctgtcaatacaatcggggaaatatatttcaggctatgaacaatacgagtgcttttaaaaacgactttaaaaagccgattatttaaagtatgatagttgctagaggaaaaatgcaatgatatcaggttatacagcactttatggcttgattgcgcacccagcgcaacatagcttatcaccatttattcataataccggttttcaccaaattcaaatggatgcgcgctatgccgtcttcgacagtcaggcgacaccggcagcaattaccagcgcaattaagacactaggtattcggggcgtcaacctatcgatgccttataagcaatcgctggttccgctagtagataacttaacgtcaacggctaaattagtgggggccatcaatactattaaaaacgaagctggtcgtttaacagcaaccaatacggatggtgatggtttttggtgtgccttgcaaaaggcacatccccagcgccgatatcgttctgtcacgattctaggggctggtggggcggcactagcggtaattgaggcagccgtgcggtatggtgtacagcaggtgaccgtttttaaacgtgctaatgcgacttatgattcagtcattcaacgattggctcaaattagcctagccagtggcctacagatcatcgttgaaccgtacgatgaccagttagcattggcaactgccttgcaaaatgctgattgtttaattaatgcaactaatattggcatgaccgcaacaccgggtaatcccttaccaattaacttactgcaatatttgcccgaagatagcctcgtcgcagatctaatttacgcaccgcgagagacagcttttttaaaaacggcccaaaaagcgcattaccaaatacaaaatggcctgggcatgctgattgaacaagcggccttgagttttgaattctggaccaacgaatcaatggcgacaatgccaatttaccaacatctaactggaggcaacgatgcatcatgattattcaatttaaagcagcaacgagcaaatcactcatccaagatttttgtgaacgacaacgccaagctggtgtcgtggtttaccaatcagcacaacacgtcgcattaattggacttaaggaagtgacattaactgctgcagaacaaacaggcgtcgattcaatgacaactgatgaaccaagttatgttttaagtagtcgattattccaacctgaaaatacaatcattcaattaccacacagtacaattggtggcgagcagtttacgatgatggccgggccatgttcggtagaatcagctgagcatattttagcgatggctaaagtggccaaggaaggtggcgcaactttactgcgtggtggcgcctataagccacggacttcaccttactcattccaaggaatgggtgaagcagggctcaaagcactccgccaagcagccgatgcaacgggcatggatgtcattacggaagtcatggatgaaacgcatgtggccctaattgcacaatacacagatgtctttcaaattggggctcggaatatgcaaaacttttcattgttaaaggccgttgggcagacgaacattccagttgctttaaaacgcggtctagccgctacagttgatgatctattaaacgctgctgaatatatcgcagccaatggtaatcaccaaatcatgctcttagaacgcggaattcggacttttgataatcaatatacccgcaatacgtttgatttaaacgcggttcctgtccttcaaaaattatcacactacccagtggtcgttgatccaagtcatgcgacgggggaatgggacttggtgacaccgatggctagagccggcgtagcaactggtgccagcgggatgatggtggagattcatgaccatcctgaagccgccttttccgatgggccacaagcgttgaaacccgcgacttatttagaaatgtgtcgtcagatctgggcgattgatcaattgatgcggtcgtggtaaaaatgccaactatttcggttaatttaacgacgcagaaatatcaaattaaaattgaaaatggtttagcgacttcaatcggacgtgaggttcaacgggtgtggtctgtacgtaaaattgcattggtcacagatacgattgtcggccctttgtatcaagcacaaattactgagcaattgacgcaggcgggttttcaagtgaccgtcctaaccatcccagccggcgaatccgctaaatctctcgaacaagcgatgagtctctatgaggcattgttaacggccaactttaatcgcagtgatggcctgattgctctcggtggcggcgttgttggggatttaacggggtttgttgcctcaacctatatgcggggcttaccgtttattcaaattcccacttccttattagcgcaggtggatagtagtgttggcggcaaaaccgctgttgatttaccagcggggaaaaatttagtcgggactttttatcaacctgagctagtcttaattgatccgcaaatgcttgagacactaccgcaacggcaattagtcactgggtatgctgaagtggtcaagatagcggccttagtcggtgccgatttttggaacctcgttcaacaaatcgaatcgccgactgcaattttggataaagccccagagctgatcgcgcgcagcattgcctataaggcgcagattgtgatggcggatgttcaagaaagtgggcaacggcgattgttgaatttcggtcatacaattggtcatgctgttgagtctttggcagatggtgagctaacgcatggcgaagcagttagtatcgggttaattgcgattagtcgccttttcgaacaaccgactcaaattgcggcacaactgcaaacagttcttgaacgggttggcttaccggtcacgcatccgttattacaatcacccgcattatttgagaaaattgcacatgacaagaaaaatcaaggtgctctgattaacattgtttatttaaaagcgatcgggcagccaactattttgcaactaccattaacacaatttagtgcccaattaaaaatgaaacagcgctcgttttagaaaatactggtaacctgcaagcagatactttacaattagactagattgaaactgatttacaggggttgattcactagatgcagttaattttaattgggtttatgggttctggtaaaacaaccattgcgcgtaaagtcgcacatcatttcaagagcgaatggattgatttggacaaatacatcatgcgggaacagcagatgacgattaacgaaatttttgccattaaaggccaatctgcgtttcggcagatggaatttgaagcacttgcaaaattggttcaagaagatgtcgtcattgcgaccggtggtggtgtggttgatgacgcacagacgcgctatctactggaacaaagtggcatccccatcttttacttaaatgggagttatgaggcgcattggcgccgcgtttcgcgtaatgatcgccgaccactggtcaatcaacttggtcatgatggtttacgggagttatatcacgaacgacgccctaaatattatcgtttggcagactacacgattttctttcaacataaaacaccgaatatgatgttgacggaaattgaaggacaactgccacgtattcaaaaaaaactggctaagcgacatgcttagtcagtttttttaatattaaaaaagcatatcattggctttttgagaccggttacttgtatgatagagttagaaagaggagggatgcccatgacttttaaattaccagcattaccgtatgagtatgttgctttagaaccctatatcgactccgaaacaatgcatcttcatcatgataagcatcataagacttatgtgacgaagttaaacgcagccttggcaaaacaccccgacttagctagcaaatcattacacgacttgctaacacacattgatgatcttcctgagtcattacagacaccgattcgcaataacgcaggggggcacgctaatcacagctttttctggcgaattttgactgaaaatgccccactgatgccaacaggtgaattattagaaaaaattgaagcacgttttggcacctttaaagattttcaagctgaattcaataatgccgcactaggcgtttttggttctggttgggcatggttagttgttgaccacgacggtgaattgcaaatcatgaccacccctaaccaagattcaccaatcatgagtgggaatcgcccattgatcggtcttgatgtttgggaacatgcttattacttgaaataccagaataatcgaattgactatatcgaaaacttctggaaaataattaattggccgcttgtggcggagttaatctaagcagcggccaatagatgacaacaaccggagtggtttcgtgcgtttccgctgggctgttgtcattttttgtagataatcaaaaaagcattcgctgaaactagcgaatgctttttattttagagattactatccgttgtaaagttcaatggtgagaggtttgcactgtccgtaatgagcttaacagtgaggcgttccatttcatgttgtgcaagttgggccgctttagcggaacctttggttatcaacatcgtccgttggtgcgcatcggtttcagctgcaacaagcttgtcagtagcaacgatattttgaaccatcaaactgttgatgtgtttttgggtttgttctaagtctttagcgaacttagcgtagtgggcatcgactagaataccagccaatttgtaggtccaatagattgaatcctttgagtaatcttttgtacctttttggtagttgactgggacatcatcagcaccggcgtaaaatggcacgtagacgctttgggcagtcacacccatcgctaaccagtgaagaccgctgacatcaacagggcggttagggcgcatttgaagaatatgtgactcttgtgttttcgctaaactaattgggcggaaagcatgtttttgttgtggtgtgccgtgaccaattggatcgtagacggtcccttcatagtgcgagcctaaaatctgagcgacatcttcgacttgaataggtgcatcaggttggcgtaagaagggcaagttaaagtcttgtggttgttgttcaacagacggtgttaaaagcttttgaccgtaccaaacacgtggtgtgttgtaaacgaggtcgctttgatcttgtgtcccaaagatgttgcggaaattaaacggtgtgccagcttgccagaggtggttatcacgggtaaagttttgaagcccctcagaagtcatgaaggcctctggttgatcaaaatcaacttcttgaatggccagttggttggccacgacagcgtaactgtcatcaggaattcgttgcgcgacccagtgatgaccactaccaatttctaagtaccaaacttcatcaacgtctgaaaaaaggataccgttactttcggttgtgccatattcactgacaatcgcacctaaacgagcaaccccttcgcgggcagttttcacgtatggtaaaacaacagtgatcattgcttcttcagcaatgccgttatcgatgtagggatcgaagccgagtacgcgactattgctataagcactttcggtcccactcatagccacgccgtattcattgataccatcttcttcgaataagccgtattcatcggtccattctggggttgcggtatatttagcggcttctagtggtagatcaagcgtaaagccggtgtcttttgaaacaaagtgaggtgctttcgttaattgttggtggggatgaatcaccatgtatttaggccaagcagcttggctatcttcgttccgtgcgattaaggtcgagccatctgcgctcgcttttttaccgaccagaacactggtacaggcggttaattgacgataaaggggttcactcataataatgcctccaaataaattcgatattaatgctcattatacaatcttttaggggaaaacacagcaattaccgttgcccaattgcgctaaaacaggcataataatagtattcgaaaaaaggaggctattattatgccattagtacacatcgatcttattgctggtcgtagtcaagcacaattaaaacaactttgtgctgacgtgacagaagcaatctcaaaaaacacaggggcacctgcagaacacgtgcacgttgtcttaaatgaaatgcaaccagaccgttactcagtaggcggcgttttaaaaagcgacgaaaaatagagtgtaactcgagctggttaggctttgaggattaacagtaaaattgggaattatggggggttcgccatgattcccaattttgcagttaaccggaaaaggctgctcgaggagcacgtttaagccatttaaaaagcgattcgacaatttagtcggatcgctttttgattagtccattttaaaatattggtgtaaataatttgctacaccgtcctgtgcgttggttagtggggtaatgtcatctgcaattgctttaactggtgcaatcgcattttgcatcgcgaccccggtaccggcataggccagcatgtctaagtcattactttcgtcaccaaaggcaataatgtcggcttggtcaatttggtaatgatttgctaaacgttcaagcccagttgctttttgaataccgtggtgcacgatttctaagacgcttgctgggccaccccacgtattaacggaaacttgggggaattggcgtaaaatttcggcccgtaaagcagcttggtcctcacgttcgacaaagactgttacagctgctggatcttgttggagtgatttacgcgttagaatttcatctgatttgagtgttgcggggaaaaatgaaaaagtattgctgtaagcttgatcagctaaaaacattgttttcccttcagcggcaatcatctgaattttaaaacgttcttttaattgaaagagactaaaaacgacatccttattaatggtgtattgatattcgtcggaccaattttgcccaggaatatgcatgagggcgccgttaaaattgaccatcggtgacgtgagccctaattgatggtagaaaggttcactcaagcgattaggccgaccagtcacaatactgacaatgtggccagctgattgtagttgggtgagtgtttcttgtgttttaagtgaaattttggcttctggatttaaagtcgtgccatccaggtctaaggcgattaatttttggttcatcatagggcctcctttaaagggtacttaagctatcattctagggataaacgattcaattgtcaattaacctgtattgtatctaaagcggttaaacagtataataaagctattgaaatagcgtaggaggcagtcagatggcagatgaagaaatgaacacgcaacaagacgattcagcaatcgaagatttaaaggaacggattttagcagcgctagaaaccgtgattgatcctgaattggggattgatattgttaatctaggacttgtctacggccttaacctagatgaaaagggcctatgtacaatcgatatgacgttgacgacgatgggctgtcctttaacagatgtcttaacggattcaattcatcaagcacttgcgaaagtcccagaggttaaagatgtgaacgtcaatcttgtttggtacccagcttgggatacaagtaagatgtcacggtatgcacgaattgccttagggattcgttaaactatcagtatgaaccttctcctttcacctgagcgaggaggttttttatgttatttagtctaagaaatgagtggaataatgacccaagaaacctacctgtcacagttaaagcaaagtgccgtctttttcaaaaacgtaccgcaactaacagcgcaatttcaagcgatcaaagcgagtttaacacgtctacaacaaaaacagttaccacagcacaatctcccagtactcgggattgacgaatcactctatctaacgttattattggcagcagagcagggtcaattcaaggcggtctcttcacagcaattacaagcgcaaattaaaaagacggatcatttactccgcaattatcggcaatatttgcaaaatcaattcggcatgtgggcttatattagtcaggatttgacggatagtatcgtccaacagtttcccgattggcgctttttggaaattatggctggtaatggctacctgagtgccggtttaagggcggcaggtgccgaatcggtcatttgtacggatagcttgtcctggacgagcgaaaaccagacagggcagcaattattaacgcaggtggcacctctcgatgcacaggcggcgctcaaacaatatggtgatcaagtggatgccgtattgatgtcgtggtcgcccaacggtgtgccgattgatttagccgtcttaaaccaattacggcaattagaaaacgggcccgtccttttatgcttgggtgagcgctacggtgccacaaatagtactgagttctgggatgccgctcatttccataatgatcaacgcttatcgcgggttaatcgctatttacgcccgtttgatttaatgcgtgatcggttttactggattcaataacgtatcaaggaggaatcagcgtttgcgtttaaaaaaattagtgcttgatgttctatttgtcggggtggtcgtcttaggcctcctcgtcatcagtcagcgagccaaagcgatgtacagtgaacgacttaatcataatagtttatcgcaaaaggcggttatctttaagacgaaaagccaccaatcgattcaatcaacaatccaagcgattgacaagaccaaactcaataatttccaagtgcaattcaatgtgaataatcacttatcatatgtttatgctaaaggtaagcaagctaatgtgccgctcaaggacggccgtttcttctcaaattatgactttaaatcacgaattccggtggtggtcgtcggacaatcccgggtcaacgagctctatcaaccagcaagccaagcttattatcagactaagaatcgttacttgtcagtaattggggttgtgggtaccaatcagaccacttcgcttgaccaacacgtctttatttcggcttcaccagagttcgtcttgaacaaccgctcgctaaaccaggtaaccgtgttagtcgatgatcaacaaatcggggcgcatcttaaagaatatcaaaagatctttaagaccaaatcaatctccaatttaacgcctaagaacacgccgattattggggtcaactggttgcgagaaaatgggacggcagcgatcatcctggtcttgctaatcatagttgctggggtgcttagtcatttatttgcgcaattggtcaatggctatcacgctcaaaagaatttgaccgctagtctttaccgtaaatatagcatgggacaaacgcagatttttgcagcacatctcttaagcatgacactgatcggttttattatcggtagttggttcttctacttaacacacttgggtattattttcggtgggttagtggtagttgatctggttttaattgcttatttctactttagaatgacgcgcattaaatcagcgcactaaaaaagcaagttagttgctagacaactgactcctgacatctttgtcggaccgattatttttttagtttttaacaaccattctacgatgtttcagcatccgccatcctgttaaggctgtcgcaatcaaacaaataaccaaggcgaccatgaaggcatcatgcatcccagcgatgaagacgtccgcgtgacctggaatataccccgttactttttgaccgtaattacgactcattgcggcatacaagaccgttgtcgatagcgaaatcccaaagaccatccctaagttacgcgctaaggcgttaatcccaccggcaacccccaaatcttggaccccaactgaactcatgacgatcgtgttattgggcgcttggaaaatcccattgcccagtccgactaaaccgacgaagaacatgaataaccaaattggcgtttgtaaattcatcaacatataaccgacttggctaattgagattaaaatcaagccgacaaaagttaataattctggaccaattttatctgaaatactaccagcaatcggtgccacaaccacttgcacaattgggaaaatcattaagctataacctgctaaattaggcgctaagcccaatgcattttccaaatagaatggtgaaatgacgttaaagaagaaattaacgataaaaattaaaaatgcacatagtaaacttaaactaaaatcaatattcttgaataatctaaatgataataagggctgttcaacatgttgttcgatccaaacaaaaatcccagcactgatcaaggctaccacaaaagccgttaaaatgattggtgatataaagccaatttgttgaccgataaaaatgccaaggaacaagctgacaatcaaggccgcaaaactgacaaatccggcagaatcaattttttcatgtgttttaataatatctttgggtaaaataaaatgcccaaaaataatcgttaaaataccaattggcacgttaatccagaaaatatagccccaactaaagtgtgtgaggattaaaccaccaatcccgggacccgcgatactgcctaaagccacaaatgaaccggttaagcctaatgctcggccccgttcttttaatgggaaaacttcggtgataatcccattattattgctcattgtcattgaagctcctagcgcttgaacgacccgcgcgccaagtagcaatggtaggccaccgttaaacccacatagtaatgagcccaatacgaaaagaagagtcccaatcttgaaaactttaactttcccgaaggcatcgccaactttaccaaataatagcagtagtgcacaaatcataatcagataaatcgagacgatccattctgattgattcatcggaattttcaaatcccgactcatgacaggtaacgcaatattgacgatactcccatcgagggtggccatgaaggtaaaaagccccaccgccgttaatatccgccaacgattcttttgaacctgcggattatctgcataacttaacgccatctgtaagtcactttctttcttttcaatttatttaataataagtatacccttctttcagaaaattaaatataaaaaatcacccccaaacgctcgaaaagagggttgggggtgatttttaacgtgctcttcaaaccatgttcctgcgtttagctacacaagtcaaacgattgcttgcagcaatcattcgccttgctatgctagtcctcagaacatacccggtttgaacgcacttattttactcttgccaagaaatattttttcttgccgcgacggacaatgacaaatttaccttcgaagttttcgcttgggtcaatttcaagtgttgtttcgcggagacggtcaccgttaattgtgatggccccattttgcacatcttcacgtgcttgccgttttgatgattcaattccagcatccactaagaaatcaacgatgtttttcttttcagctgtgatttcaactgttggtgctttttggaaagcttgttctgcttctttgacatctaaggctttgatatcacctgagaaaagcacttccgtaatcttttgggcaccttctaattcagcttggccgtgaacaaaacgtgtcacttcttcagctaaacgacgttgtgcttcacgtttttcaggggctgtttcaactgttttagcgagttcgttaatttcagcttcatctaagaaagtgaagtatttcaagtatttaacaacatcgcggtcatcttggtttaaccagaattggtagaattcgtatggtgttgtcttttcaggatctaaccagatggcaccgccagctgtcttaccaaacttcgtcccgtcagccttgagcatcaatggaattgttaagccgtagacttctgtttcgctaccttcaattttatgaatcatatcgatccctgaagtaatattaccccattgatcagcaccaccgatttgtagttgcacatcgtgtgctttgtaaaggtgcatgaaatcgactgattgtaagatttggtatgtgaattcagtaaatgaaatcccaacgtctaaacgactagcaaccacgtctttagccaacattgtgttgatgttgaataacttaccgtaatcacgtaagaaatctaacaatgaaatttttgataaccagtcgtagttgttaaccattgaaacgttggcatcttcgccgaataaacgtttcatttggcctgataaagcttcaacgttatgttgaaccatttccattgtttggagttgacgttctgatttacgaccacttggatcaccgattgaacctgttccgccaccgataacgatgtatgggtgatggccagccaactggaagcgtttcatcatcatgaagggaattaaatgcccgatatgcatactatcgccagtaggatcaaccccacagtataatgagatactcttcttttcagttaattcacgtaaaccgtcagcatctgtttgttggttaattgcgtcgcgccatgttaattcatcaataatattcttttgcatttgaaaccctcctaatataataaaaaaagtccctataatcctcgtgagaagattatagggacgacttaaaatttaagttcgcggtaccacccgaattatgctagttgcctagcatcactcattgattggtacgtcaatcacacgtctgaccacttagcgtattgtacttcgattctaagcatatactggtttccagcaatcccagctctctgatatagcggcttattctctactcattacgcggtcattgatatttaactatggttatacgttaatcgatttaacaccgcttgtcaatctaattatcatcaatctattaaaaagaaggtccacagactaatcagtccggcaccttcttcaaagtattattaatcttttttaagattatagttttttaacgttagcagcttgtgcaccacgtgtaccttcaacgatgtcgaattctacggcttggccttcttctaatgatttgaagccttcgtcttggatagcactgaaatgtacgaagatatcgtcttggccttcaactgagataaagccaaaacctttttcattgttaaaccattttactgttcctttttccatgatgttactcctttaaaatacactatattatctagtcaaccgtattggtcttctaaacaagtttattatacgtgattttgtaaccgcatgcaatcagaaactctgattaatttaacttgtaacatgtttgccgatggtactgttcattggcctttaaaataacattgccaaagtccgcatgatgaatcgcatccggcatcatttgggcttcaattgcgaccgcttcgtgcggttgaatcgctttatcagtcaagtttggttcgctcccgaaaccgttggcagtgtagatgacaattgcattgccttgtgtattaatcgttagtgagcgaccactagttggttcggttaaaaccgcgtcatttcgatcagcatttttatttaataagaatgggtgatcgtagccgtttaccaattgattttgtgtttcttgactgtcaaaagcatcagcaattgcacgtggttgtcgtaaatcgaaaacagtttgatcaactggcaatagttgcccggttggtagaccatctggttgaatttcgccgaaacgatcactgtcaatttgcaattgatgaccatcgactaattgatcgaagtccccggttaagtttaaataaacgtgacaagttgggttgaaaagcgttgtttgatcagatgttgcttggtaatcaaccaaccattcattcttttcattcaaggtataagtcgtcgcaactgacaggtttcctgggaagccattggcaccgtcaggacttgttaatttaaaagtaacgctaattgcgtcggcttgttcttcaacgcttgcttgccaaacttgagattcaaagctattaggaccaccatgattggtgttttcgccgttattaagtggtaattgataatcgtggccgtctaatgtgaaggcccccttaccaattcgaccggctacccgaccaacagtcgcgccaaagtaagcttcttgtttgagataatccgctaaattatcgtaaccgatcaccacatttttaaattgtcccgccttatcgggcatcactaaattcgtgatggttgccccataatcgataactgctaattgatagccctgactattttctaaccaatgttgccaaacagtctgaccattaatcgtcccaaattcctgacgccaatatttcatgacttgacctccaattgatttttaacaggttgtcagcaacactttttaggcattgttgacacgctctgtaaatttgataaatgctgcttgtccttttgcatcgcgcttgaagacacctgcatcttctaaaacacgcatgaagactttaccgacttcattttgaaccaatgccgtaacattggctggtgtgactgctgaatgatcagccttgatttggtcggcccatgttttgtgataagcggccatttcatttggttgatcacagaggtatttttcaacttctgccatttcagacttcaaacgtggtggtagaatcgctaagcccatgacttcgattaaaccaatattttcttttttaatatgttggacatctgcgtgtggatgataaataccatctggatgttctggcgatgtttgattgtcacgtaagaccaaatcaatttcatattgatccccacgcattctcgcaatcggtgtaatagtgtgatgcggtgtcccgtctgcttcttgcgctaagacttggacttctggatcactgtagtgttgccacttagtcagaatgtcagcagcaagtgtttcaatgcgtttagcatcactgcctgtcaaacgaatcaccgacattggccaatcaacaattccggcttgaatatcatcataacccgcaaattgaagtggtgtgctgattggcgctttggccattggaaaatcatgccggccaccttgataatgttcatgcgttaaaattgagccccctacgataggcaaatcagcgttactcccggcaaagtagccagggaactgtttaacaatttgtagtaggtttttaaacgtggtttgatcaatcaccattggttcgtgtttgccatccaagaagattgaatgttcattgaaataagcatatggcgaatattggaagccccatgtttgttgttctaaatcaaagcgcacaattcgatggttacgccgcgctgggaaatccaaccgacccgcatacccttcattttctaaacaaagttggcatttaggataacccgtttgcttcattgttttagctaacgcaatttgcttaggatctttttcaggttttgaaaggttaatcgtaatttctaaatcgccatatttagtgggtacatcataagcgatattcttcgcgattgcggcaaccttgatataatcgttggcttggcttaattcgtagaaataagccaacgccttttctgggtccttttcgtataacgtccaaaaacgcttgttaacggcacttggcaatggtgtcaccaaatccatcaacttagcgcccaaaatatcgcgttcagccgctaaatcttgaatccgctgatggtcaactgccaattggaccaacgcttctttcaagtcaatcaaagttgtcgtctcttgtgcaacaactggtgtttcatcaccttcgccaactaagtcgaggacaacgttaaataaatattgttcatcttcagccgtataagttgtttctggaaaagtgctgacttttgtaataaacttttgaatcaattctcttgcttgcatattctttcctctaccgatctgcataaccattaggatggtttaagtgccaattccatgcggtttcaataattgcttccatattgtcatatttagggacccagccaagcgtttcacgcgctttgtcacttgcggcaatcaatgtgcttggatcaccggcacgacgaggagccattgtcacaggaattgccttgccagtcactttacgagcagcttcgacaatttccatatttgaaaagccagttgatgagcccaagttaaaggcgttgctatcatggccgtctttgagatattcaaaggccaagatgtgcgcatccgctaaatctaatacgtgtacgtaatcgcggacgtttgtcccatctggcgtatcgtagtcgtcaccaaagattgataattgatcacgtttaccagcagcgacttgcaatacgattggtaacaagtgcgtttctggatgatgatcttcaccaattgacccatctggtttggcaccaacaacgttgaaatagcgtaaggcgacaaatttgatgccgtaagctttatcggcccacttcatcattgtttccatcatcaacttactctcaccgtaaggattggttggtacttgtgggtcggattccttaattggaattgccttaggttccccataagtcgccgccgttgatgaaaagacgatccgtttaacgccgaattcgttcatcacttcaagtaacgccgtcatcccataagtattgttgtcaaaatattttaatggcgattgcattgattctggcacgattgaaaaggcagcaaagtgaatgacaccactaacgtcttcttgttggaaaacgttgcgcataaattctttatcgcgtacgtcacccttataaaaacgggctttggcgttaatcgctgccttatgtcccgtaactaaattatcgacaactgcgacgtcataaccgcgttcaattaattgatcaactgtatgggaaccgatatacccggcaccgcctaatactagaattgacatattgaaacccctcctaatttaatgattaacctaacttcttagcaccgtctgcgatttctgcgacatagaagcttggggcataaccaattttatctgtataagccttagcaacattttcttcaaaattatcaacttggtcttttgcaacaatcgcaatggcacaaccgccaaagccagcaccagtcatccgagcgcctaagacgccaggttgttgccaagctgattgaactaatgtatctaattcaatccctgttacttcataatcaaattgtaatgacacgtgtgatgcgttcactaacttaccgaagcgttcaaggtcattgttcttgagggcttctctagccttcattgtccgttggttttcagatacagcatgacgagcacgttttaataagttttcgtcttgcaacatgtatgtttgtagatcaaatgtttcgttatctaaatcacctaatgagttgatatcattcttagtttgtaaaatcgctaatgctttttcacattcactacgacgttcgttatatttagaatcagctaattcacgacgtttgttagtgttcataatgatgatcacgttgtcttgtaagtcgattgggaccaaatcataatccaatgtattggtatcaagtaaaatagcgtggttagccttgctcatcccaactgcgaattgatccatgatacctgagttaacaccgataaatttattttcaaccatcatccctgttttaacaaggtccacacggtcgatatctaagttaaattggtcttctaaaataacacccattaataattcgattgaagctgatgatgataaaccagcaccgttgggaatattaccttttaaataaatatccaaaccatgatcgattgtataaccttgttcttgtaagtaaacaatcatgcctttaggatagttggcccagttatgtgctttttgatatgataaatcgctaaggtcaaatgaaatgacaccagcatcttcgaagttacctgataaaagattgattgtttgatcttcacgtttagcaacaactgcgtatgtccctaatgtgattgctgttgggaaaacgtggccgccgttataatctgtatgttcaccaattaagttgatccgaccaggggcaaagtaacttgcttcaggttccttgttgtaggctgctttaaatgcggtattcaattctgtcatgttcatggtaaattcctcctttattaatcgctttcattttactaaacatttactaaaaaatcaaactatttttttaacgcgcgcattattttcgggtagtatgctaaactagatagtagtaaacactgaattgagaggtgcaccttggcaactattaaagatatcgcacaattagctaaagtttcaaacgcaactgtctcccgggttttaaattacgatcaatccctttctgtaagtgatgaaacccgccaacgcatttttgaagccgctgaaagccttagctacactaaaaatactaaaaaaaataataaccatcggggccgcatcgcgattgtcgaatggtataccgctacagaagaattggaagatctctactatctatcaattcgcctgggcgttgaaaagaagctgcaagaactcggttttgaagtcactcggtttttccaaaatgatccttttgatactctttatgacgccgctggtgtcattgtcatcggtaaatacagcttgggtcaaattacccgcttgaaaaaattaaaccgcaatctcgtctttgttgatatgaataccttagattacgagattagctgtgtcatgaccgatttcaaaacaccggtcaaagcagttgtcgatcattttatggcgagtggtttaacgaaaatcggaatgttaacgggccaagaaagcacgtccgacaatgttaaattggacactgacccccgctcaacccacttcaaacattatcttaaaaagcaaaacaacttccatcccgaatggctactcaccggcgatttcacaccggaatctggttaccagctcattacacagttacttcatgaacaggccgagaacttaccagaagcactcttcatcgctaacgacgccatggcggttggcgcactgcgcgcccttcatgaagcggccatcaaagtacctgagcaactcagtttgatcagctttaatgacacatcaatctgccaatacacgttcccaacactcagctcggttaaggtctacaccgaacaaatgggccaatcagcagctgaattattaattaagcaactcgatgcggaacaagtcattccgcaagtcattacaattgggacatcactaacattgcgtaatagttcaaaataatgagtatgggactgggacaaaagtaaattttgttccagcccttttttttaccatatcttattcccatttcacggtataatagtaaaatcagataatgttaggagtcactattttgaaaacgaaaaaaatgcgtcggctactactaaccgtcgctatccttgcgattggttatttgggtggtcgcaataatatcctgcaagatatcacccagaaaatccccgcccttacacaatccaccacacaacaggcgcaagtcagtcccgattatcaggcaattgctaatcgcgactttgaaaatggcagcgccgcttatcttgccatcaacaatgacaaaagccagttgactagtgccgattggaccagcgaaaaaaccgattatggccaattagatcaactcaatcgaaccacttcggcaacagcctatctgtcttcccgcaacctagggaaatctgaagggcgctcacgccaagtttggcatccgactggttggcataatcaaccactggtcgtcaacggtcgccgcatcacacctcaaaaccgtggccacctgattgcttacaccattagttttaattttgatcaaaatggtcactttcaaccggggcagccaggtagtttagataatccgttaaacctggcgactcaaaccgaatatagtaatcaaaagacgatgcagatttttgaagaaagggtccgtaacgcactggccgctaataaaaaagtgatctataaagtgacaaccgtctttcgtggtaatgaattaatgcccggcggttactgggtccaagccatctcgacagatggcacccttaatttcaacgattatgtctggaacatcgaacccggcgtcgcctttgactacgcaaccgggcggtctcacttagatgctaacgttcaagtaaaagatgcgcatccaattgtaaacaggaccgaaaacaccgtcaacaatatcaaaaatcgattctaaaaaagaagcagtcactgttaggttttcctaacagtgactgcttcttttcataaattgaaataatactaatttatacacgagtcatttttatattcaaatactaacagcacactttttttaaatccgttatttctccatcgccttgcgcaatgctgctgctagtggactttcagccggttcttcctcttggtttactttttgaattaggcggcgttcttcatgttttgaaattttcttcttacgatcttttttattgagcattttttctgtcgttccatcattcaagcaacggaaataagcaccggcttgtccttcaatgatgaccattttcttatgacattgtgggcaccgatggttggaaacttttggatccttacgacgtcgataatgacagtttgtgcagacgtaaaccttgccgtcacgcgtattacgctccttcaacggatggtcacattctggacatttcttgttggtaatcgcgaaatcgtgatattcagtttcactctttttaatctcagaaaccaaggtcttagtggccgcttcgatttcagtgatgaacgctttttgattttcttgaccacgcgcaatcgcctctaatgaattctcccatttaccggtcaattctggtgagaccaatgttttattaaccaatttcaacagttgttgccccttaggtgtcactgctaaggaatggccacggcgttctaagagttcactgcgcactaatttttcgataatttcggcccgcgttgctggtgtccccaagccatagtgttccatcttacctaataaggtcccttcagttaagggttttggcgctgatgttaattgttccttaattgaaaagtcagcaggcacaactgcgccttcttgccaatcaatacttgtagttggtgtttcttttgaatctgcgtgccagccttgttgaacgaccttagtttgtttgaaggtaaaggtgtggtcaccaaactgaacagtcgcttttgtaacggctgtgacatattgatccgcaaacaagcccataaagcgttcgacaattaaacggtacatccgcaattcatcggtagataatttttcagctctgactggttcttcggttggaattaaggcgtagtgatcagtgacctttcgatcgttgaaaacagccggttgtttcactttagcgccctgccctaagtattgtttggcgcgcggatcaaacttcactaaggccgataaacgttccttcaatgtgccttcaatatctgttgaaagatatttagaatccgtccgcggataactaacaactttatgaatttcatataatgattgaatcaatgacaacgtctttttagccgacaagccgtacatcgcattggcaacttgttgtaattccgtcaaatcataaggcagtggtgcagcttgtgatttttggctcgtcttgacactacccactttaccttgtgcctgcttcaatttagcgactagcgtttcggcttgcgcacggtcttttaagccctgtggtttagccatttggagcgtggcttgttcttggccaactttcaattgaattgtgtaatatttttcaggtttaaaacgactgatttgttgcgctgtttcgttcacaaaagccaatgttggtgtttgaacccgccctgctgacaaattatcttcatatttcgtcgttaaggcccgcgtgacgttcaagccaatcaaccaatccgcatggccccgcgcaagcgctgaagcgtacaaattatcaaactgcttagctggtttcagattggcaaaaccgtctttaatcgccttggtcgtttgtgatgaaatccaaagtcgttcgactggcttatcaaatttaatccattccaaaatataacgggcaacagcttccccttcacggccagaatcagtcgcaatgactgcccctgaaatatcctgacgatgcgccaaatggctgatagcctttaattgcccacccgttttaggaagtggtttaagcccgatatgcttaggaatgattggtaaatcttctaaacgccattgttgccactcttttttaatatcttccggtaattgtaatgataaaagatgaccaaacgcccatgtaattacgtattgatcgccttcaaaataggttttagttttctgattagtaccgagaaccttggcaagctctttagcaacgctcggtttttcagtaatgactagttttttacgcatttaaattcctcttaatgaattgctcagattagttactgactattagtataacgcatatgggaaggggaatgaactataagctaatgagaacagattaaagttttactttgtattgacatatcaaaaaagagcaagcccctcatcttttccagatgtttggcttgctctttttagttttattcatcgtcttcagtctggttactgagttgttgtttcacatcataggtattacaaatagccgttttaatcacttgtgacatttgataatctgcctgaccaagatttaaataaagctctaaaatcattggtaagttcaaactggctaaaattgtgatgcgctcatctgttaaatagcgttctagtacgacattacatggcatcccgcctggtaaatcaacaacgattatcacttcttgtgcatctggtcttgtgcatctggtcttgtgcatctggtcttgtgcatctggtttaagcgcaacttcaatttgatcacctaataacgtcttactaatttcacaatcgaaggtgatggccgttacattatcatgcccgccggcaatcatatctaaactcgttaaataacttttggccaaatcaccatgactgactaatatcaattgtctcattcgctaatcatccttttatctgtaagttctgacggccttggtccgttctgtttgatccgtagttgttttttgattagctgtatcggctaatacggtccccgtgtttagtgtacttaaaaccatactcgataataaaattgtctgataggctttcataatttactcctccattgttatcacaatactcaagatttttttattatagcattcaaaaatgcttaacagaggccgttacacgggtaaaagagtcagtctaataacagtcaatcaaacgactataaatcaatttttcgttcaatcatattgcaacgtaactatcataaaaagcccgaccaattggtcgagctttccatgatggttgttgcgtttccctttattttggtacactcttagtttaccaaatcatgatttcatcaccactgacaaacacgccgtcttgttctaatcccgaacaaaacgcttcatttgtacagttgttatttcatcagccgttcgatttgacgtaaattaaaacagacgcgcacatcaacggcctcgccagattcttttaaattaccttcaaaccaacgatcaatttggttaatgagtgccccactgtaaaagatctcaaagtctttcaactccgaatcagtatagtgtggtcgatatttttcaagtacttgtttaaagacagtcgttgtgaaggattcaaagaaagcacagcgcagcatttcatccgagaaacgatagagatttaaacaaaattcaggataacgcataatgaattggaccatctcgtgacagccctcttcccagtggccggcgcaaatcgcctgcctcaccagcgctagtacctcttgctctaatgtccatctaaacagaccacacatcccatttggaaaatgataataaaaggtcgttcgtgagacctctgcctgttctaaaaactcagcgacggttaattttcgttgccgtttctttgataataattgcattaaaattaatgccatatgttgcttcataacttgtcctttcctcatttacccaccccttcttaatttttcctcttctagtttatcaaaaaaatgataagtcatgtttaaacattaacaaagactaagattaatgtaatcgttatcaaatttttcgaacaaaaaaagctcagatataccgcgttattgcggcaatctgagcttttttaagcatcatgtttatttttctaaaccttcagcaactgcttctgggtagttggctgtgacaatcgcagcacaacgcgcacaaagcattgggaacttgtcgtctgaaccgacatcggtcttaatcatccgacaacgatcacaaacgtcaccttcggcatgagcaacactaacagcaacgccgtcaaattgtgtggcttctgctggggcttctacagcttggtcagcaattgttaattgtgagacaatcaataattgtttaacgtcagcatctaatgaagctaataaagcagcattggcttcgtttggataaagtgttacggcagcttctaatgacttaccgatgaccttgtccatccgggccgtttcaagggcttttaagacatcgtcacgaatacccatgaaagcattccatgtagcgactaagtcttcttcaccggcaaaatgtgccacttctggcatttcagctaattgaacgaattcttctggttcatgtaagtagctccagatttcttcagctgtatgtggcaagattggtgttaataacttcgtcaaggcaactgctactgcatagaaaacagtttgcatgttacgacgaggcgcatcattttggccatcaatataaacaacatctttagcgaagtctaagtagaaggctgataattcgttcgttaagaacatattgattgtcttataaactgtggcaaaatcgtaagcatcgtaagcagctttacaactttcaatgattgcgtttaagcgaaccaacatgaacttatcaactgagcctaattctgcgtaatcaactgtgtctttggcaggatcaaagtcggttgtgttagcgatcataaagcgcattgtgttccggatcttccggtaagcttcactgacttgttggaagttttccattgtcactttcacatctgaactagcatcgactgaggctacccagaggcggacaatatctgcacccatttgtttaatgatcttttcaggtaggattgtattcccaagtgatttactcatcttacgaccattaccgtctaagacgaagccttgtgagataacagccttataagggctcacttcgccaaccgcaacgctcgtgattaaacttgagttaaaccaaccacgatattgatctgaaccttctaagattaagtctgctggataagttaattcatcacgagcagctaaaacagcttgatgtgatgaacctgaatcaaaccaaacatccatgatatctttttcttttgtaaattcaccatttgggctaccaggatgtgtaaagccagctggtaataagtctttagcatcccattcaaaccaaacgtttgaaccgtgttctgcaaagagttgtgccacacgttcgattgtttctggtgtgatgatttctgtaccgtcttcagcgtagaagattggtaatggcacaccccatgcccgttgacgagagataacccaatcgccacgatcacgaatcatgttgtaaagacgcgtcttaccccattctggcatgaattcaactttttcgatttgtgccaagatttgatctctgaacgcatcgattgaagcaaaccattgtgctgttgctcggaagataactggtttctttgtccgccagtcatgtgggtaactatgcgtgaagaagtcgagtttcaataatgagccgttcttttcaagcgcttctgtcaccattgggttggctttgtcgtaataaacaccttcaaagccaggggcatcttcagtcataatccctttgctgtcaacgactgaaagcactggtaacttatattttgtcccagcgttgtaatcatcttcaccgtgacctggtgccgtatgcactaaaccagtcccagtttctaatgtcacgtggttccctaagatcaccaatgattcacggtcatataatgggtggcgggctgtcattaattccatgtcagcacccttgaaagtcttcaagatttcaactgattcccaaccaagaagatcagtcatcttgttcaaacgttctgcagcaacaacgtatttttgaccgtcagctaatacttgaacataatcaaaagctgggttaacagcaatccctaagttagcaggaattgtccatggtgttgttgtccagatgatgaattttgtgtcagcatctaataaatctttaccatcaacaacgttaaacgcaacgtacattgatggtgacttgatgtctttgtattcaatttcagcttcagctaatgttgattctgatgaaggtgaccagtaaacgggcttcttacctttatagatatagccttttttagccatttcaccgaagacacgaatttcttcagcttcgaaatcagctgttaaagtgatgtatggattatcccaatcagcagaaataccaaggcgtttgaaatcttggcgttgcgtgttgacttgttccatggcatagtcgtaacaaagtttacggtagtcaacaaggctcatttccttccgtttaataccctttttagccaaggcttgttcgattggcaaaccatgtgtatcccaaccagggacaaaaggtgcgcggaaaccgttcattgatttgtaacgaacgatgatatctttacttgttttatttaaggcgtgacccatgtggatattaccgttagcaaatggaggcccatcatgaagtacgaatgatggtttaccttcatttaatttttgccgttgttgataaaggttgttatcggcccaacctttttgccaatcgatttcacgattaggcaaacctgctcgcattgggaaagctgtcttacccaagtttaatgtttctttgatacgcattaaatcactcctcaattttttaaaacaaaaaaagaccccgccccgtataggacgaaatcttcgtggtaccacctaattttgagagtcaaagaccctccttaagatgcgttaacgggcattggccgttccaaactacttgattcatctgaaaaacaacaaggtgatacacactaaatagagcattaccaaccttccaccagtcgttggctcgcttaaatgttatttaatttgttaattcttgttattgtctgttaatggttcgctatcgtcttcttcgattggattatagccatagtcattatgagtttcttctgattgaatttcatcatctaaagtatcggccttaatgactggttcttcaggtgcttcttcatcagctacttctggtaacttatcatcagggaaaacaatcgtatgggttgtttgatcagaaaagtcatcagtcgtaatatcatcccatggtttaactactgtctctgagtctactagattatgcttcttgctgtcaaggtctgtgaggtcaatttctgcagataatgcttcatgaccagctaaatcatctttagataataggtctgtccattcggggctcttaacaacttccaattgtgattcgagcatcacttgtaatctttgacggaaaacgcgtgtttgtttcttcaaatcgtctgtttcgatggcgatttgtttagcacgttcagttgcatcttcaataatgtggttggctttttcagtcgcatcattcaacattgatttagaattcttttctgtttcagtttgaataatttcagcttctcttttagcattttctttaactttatcggctgcttcttgggccacaataattgattggttcaaggcatcttttaattcgttaaagtaagtgaccttttcatcacttgattttagttctgcttttaaagcatcattttcatttaaaactgattcgtaatccttaatcacttggtctaaaaagtcattaacttgatcaggattatatccccgcatcttattgccgaactctttgttatgaatatctaaaggtgttaaaaccattctgaaatccctccgtcattttcaacatttctattattttcttagaataccaagtgtcacacggtatttttctttacgcgtttgaccatcaattgatttgagctgaatgcgcccatagccacggacagaaataatgtctaataagtctaattcaaaatcaggcttatcaaaggcttgccaattcaatttcactttattaccttgaacaagctctttagcacgttgccgtgacatattataaactgccgcgataatcgtatctagtcggaatgaactgactaatagctgttcaaactgccaagcatccttggggataatcaactcagtataggcttgttcttcaaggtgaacagtaactttaccaatcttcgtaatctgactcaccacatagtcagccatcttagttgtgacaaaaaattgccaccgttgaccatccgtcatgatatcaccaaacacgtttcgatcaataccagcgttgaccaatgttcctaaaatcttaccatgcgaaagctgtgcaaatttaattggataacgaatttcaaagagttggatttcaaagtcggcttcctcaggttcaaaataagttggtgcaatcaacgcacgttgtcgttcagcagcattgtagcccccactgaaatggtatttaagctcacccttttcaccaattaaggtttgtagaatgtaagcctgtctaggatctaaaaaatccgttaatattgcacggtattcagttgttgcttgttcaatccaatcaagaacttgtgcaacaaatggcgcttcactttttctaaagtgctgataaacagcttcgttatcagccatcttagtaatacctcatggctaagatttgaataatcgtccctaagccacgttcaactaaatacaagacaaagccagcaatgatggcggaaaaaccaataccaccaattgctggtatgatccggtcaaaaacccctaagaagggttcaaccaatctcgcaagtagctgacctaatttagaatccatcgcacctggaatccaagttaatagacaataaataaagatgatacccacataaatccttgtgacttgcattaggaacattaataaatagattacaaattgcacttagttcacctcagaatcaaaatcattttgatcgataatatcggatagattaccgtcaatttcatagtttggtggcgtgcataaaaagatttgttcaccgacccgttgaatttcaccattaattgcgaaaacggtcccggtcagaaaatcaattatgcgtgacgcttgtgcaccctcaattctcgtaaaattaacaataacggctttattttcgagtaaatgcttaccaacttttttagcgtcagagtaaatacgtggttcgcaaagtacgattttattcatcttagcattgcctgcggcggtcattgaaataatattatccggacgtgatgttggactgacttcatcagttgtcttggttccttgcagatcagtcgaataatcttcatcttctgtcatgccgaaaaaattactgaaactaaatttaccagccatcagtcatcctcctaattatttacgacgtcgtttaaaaaatgggggtacatcattgttatcttgttttgtatccacagcgtcactgtctacttgtgctgttcgtttgaagatgtcgaagtctttcttttcaacttcatcaaatttttcagtcgctttcgcttgttcgcgtggattaggttcacgacgcatgtcccaattgccgaaaggatcgtcattagttgtttgtttaggtgtactaggttgtacaggttgacttgttgtttgagcagcttctggacgttttggtgttttaccatcgttatcgatcccagttgcaatcacagttacgacaacttcgtctccaagattttcattgattgatgtcccgaagattaagttgacttcacttgttgcagcttgttgaacgataccagcagcatcttgtgcttcaaataatgacaagtctgggccaccagtgatgtttaagaggacttgttctgcgccatcgattgaaacttccaataatggtgatgaaatagccttcttcgttgcttctgctgtccggttttcgccagtagctgaaccaatccccatcaaggcagaaccttggtttgccattactgttttaacatcagcaaaatccaagttgacataaccaggtgatgtgattaagtctgaaatcccttgaaccccttgacgtaaaacattatcagcttcgtggaaagcttccaacattggtgtcttcttatcaacaatttcaagtaaacggttattagcaataatgactaatgtatcaacatgttgttttaattcagcaatccctgaagcagcgtttttaccacgtttagggccttcgaatgtaaatggacgtgtcacaacaccaacagtcaatgcgcctaagtctttagcgactttagcaacaactggggctgcaccggtaccagtaccgccacccataccaccagtaacgaagattaaatcagcgtcttttaaggcttctgctaaaacttcttcactttcttcggcagctttttgaccaatatcaggtgttgaacctgcacctaaaccgcgtgtcaatttaggtcctaattggatttttgtttctgcttttgaatcttcaagcgcttgtacgtcagtattagccgcgataaaatgaacgcctttaacgccttcatcgatcattcggttaacggcattgccaccagcaccgccgacaccaattactttaataactgcgccattgttttcttgttccgcatctaatgaatattccatatgcttttcctcctgtaacgactagccctattcaaaaaagttactaaagaaactttttaggccttcgaatgtatgctttgattcagttttatgtttcttttgtggtgcttctttaggtgtcgcttgagtcttagcagttgacttcgtcgctgtttgacgtgcttcaaattgctcgacattgccaagcgcactttgaaccagccaatccacttccgtcaagttagctatgtagttaattaaacttaacccttgcgcaaacgaaggatgacgtaatcccatttgatctggaatgtagagtttaacagggcaattaaaaacttcctgtgctaaatcaacaattccaggtaaagctgtcacaccgccggtcatgacaattccgcccggcatatcgaacgcattgactttatccaaggccgtcttgagacgatcaaagatttgcatcatacgtgcttcgataatttcagctagtttcttctcagtgatttgaatcggcgctgtttgacccacgacttcgattggaatttgttcttcctctgaagcaactagtgaatccgcattcccataatcacgtttagctttttctgcattctcaattgatgtatttaagaccactgaaatatctttggtgatgtggtcgccaccttcttggtcaattgcagtaaattttaattgatgatcatgaataactgcagcggtactttgaccaccaccaagatcaacaataattgcgccaaagtcttgttccccatctgataacgctaatttacctaatgctaatggattaacgaccagttgtgagagttcaagacctgctttttcaatacatttctttaagttgtgaatcattgttttaggtgccgtgaataaaattcctgacatttcaagacgcacacccatcatcccgcgaggatctttaattccgtcaaaaccatctacagtaaactgcattggtaagaccgttaaaatctcacgttctggtggtaagttccgcactaaagcggcgcttgcaacatcttgtacatcttgacttgttatttcttttgattgatcagaaacggcgatcatgccttggcattcttcaatctgtaatagattagctggaatacctgcgacaacttgtgtaatttcaatatttgctttttgctctgcttgttgaacggcttgttgaatagcggaaactgcttgatcaatatcaacaattgtgccgcgactcaacccattagatcttgccgacccaacacctatcacgtttaattgtttattcattgattctgcaacaataactttaattgaagtagttccaacatcaagcccaacatatatttttgaattctccattaaatatgtggaacctccttgcattcaattagaataaaatgattcctatgctaaatagtaccacatttcgactaggtttagaaagccttagaatgttatttgaagcccattaactaattatttaagcgattacgacttcgattgcttaaataattttgaatacgcacccacttcaaggtcaattttacccttgccatccatttgtttcactaaaacaggataatatttaatttttttggccaacgttcttaaatcaccaattacttcgttaccatcattcatatataagtgaacttgataaggattatcattttgtgccgttaaacgaatctcagaaaccgcactttgaatgctatcaggaatatcattataaagcttaaggcccagtttcaaataacgatcatttttaaaatggctgtaaaccggactattccctaatgactgggtcattttcgtttttaaaatagtcccattttctaagattgggtaatactgcttatgcttaaacatataccccaccgtcttatactctgaaacgttgattgcaacatgatttatttggctcacttgcaagccaacctgtttaatcttaggtaatttcgtttgaatattatacttagttttcgtgtggtgcattaattgccacaacacattatcgccaagctgaatcccacttgcattaatgacctgttgatcgggtaccgactttgtgccgttaacggctaactgttgaatatcactttttgttgagatgaaataagttgcagtcaaactacctaaagtaaaaatccctagaatgaccactagttgccatctgatctttttaccacgttgtttctttaactgcggtagttgattggtaattgttgggcgccccggttttaaacgttgtcgccgttgccgtttccaccgtttaatctggtaggcgcgccacacctttaataactgtagcggatcatgtgacccgagctgctttttattatttttcaagtcacacgcttctttctacaattaaataatcgtttcaatgacctcaataatccggtctgatgcatccggaataccactcttcttagcagctttagccatcgcatgttgtttttctggcgtttcgaatagtgtatctagtgctttaacaagactagcacctgttaattctggttctggaattaaaatagcggcgtcttctttcactaaactttgcgcatttttagtttgatgatcatttgtcacgtatggactaggaattaaaattgatggaatccccaatgccgtaatttcagcaagactagtggcaccagcccggccgacaattgccttcaagtcaggtaatacttcgggcatattactaatataaggcacaaacgccaaattactatttaacgtagtattagctaaggctgcttgcacattttcgtaatggacttgaccagaaacgaataggacttgatagtcacgttcgtttaaaagtggcaccgcatcaataaacgccttgttgatacttggggcgccacgactacccccaaaaatcatgacagttggactatccgtttttaaaccaaattcgcttaagcgttcattgggaaccattccggccacttgttgggcccgtggattccctgttaaaacgactttgtgcattggaaattgatcgctaacagattcaaaagaaattgccactttatcaacgaaccgtgctaagaatttattcgtcacaccggctgctgaattttgttcatgaataatcgttggtacttttaaacgacttgcggcatataacagtgaccctgacacataaccaccagtcccaatgacaacatctggtttgaattctttaatcatttttttagcagacttaatactgctcataaacaattcgattgttttaagattggttttaatcccgttaagattcattgagcgtttaaacccttgaatctcaagtgttttaaaatcaatcccctgatcaggcacaattttactttctaaaccacgttctgttccgacatataatacggcatctaacaaaccacgttgttttagacgttcaattaaggctagtgctgggtaaatgtggccacctgtgccaccgccagatatcattactctcattattaaatctccaatttattctgtaatttgttcaaccgcatcaatgtagacatcgccgcgttcttcaaacgttttgaattgatcccaacttgcacaagcaggtgataataagatcacatcaccctcttgacttgccgcgtaagctgcaggcactgcttcagttagttgatcgacaatttcaatcgtttcaattccggcttctttggccgtttgtgccaacaattgctttgtttcaccataaaggataatcgccttgacatgggctttcaataaatcagttaatggttcaaacgtaaaaccacgatcaaggcccccagcaatgagaacgattggttgtttgaaactcttcaaggcaacctctgtcgcttccatatttgtggcttttgaatcgttatagaaacgacggcctgcgaattctttaacgaattgcatccggtgtttaacacctgtaaaggtcgttaggacttcaataattgcttcgtttgattggcccattaacttagcggctgccagtgctgctaaggcattttcaacattgtgatcgccagggacattaatatctgtaactggcatgatgacttcacctttaaagcatagttggccatctttgacataggccccttcttcagaagtgcctaatctagaaaatggcacaacttgcgctttggtttgttggcttaaggttcttaattctggtaagtcccagttcacaacaaagtaatcagaagctgtttgattttggacgatccgcatcttagcttgcacgtaattttcacgtgtcccgtgataatcgagatgtgcttcgtagatattcgttaagactgctaccttgggtttaacagttgttgtccccatcaattgaaaacttgataattcggtgaccattgtatctttggccgttgctttttgagcgacttcactcaacggaataccaatgtttccggcggcatatgcatgtccttgtgcacgttgatagttcaacattaaggcgattaaagtcgtcgtagttgttttcccgtttgagccagtcacactcacccagtcagcttcagaaacttcataagccaattctggttctgtcaagacgggaatctcgcgtttgatggcttctgccaccattggattatcatagcgaattcctgggtttttaaagaggtaatggaacccttcttcaaataaagcaactggatgactacccgtaatgacagttgcaccaagcgcccgtaattcagcgactgctggtgtgtcctcttgatcttggccatcattaacagtaacttttgcgcctaattgtaataatagtttagtagcgttaacgccacttttacctagtcctaatactaaaacagattgattttgatatgttgcgatggttctcatcgaattcgccctcttctaaaaaattaacagataaattgctgaacagataatgctgaatacccagaaactaatatcaatacgccattcgctccaaccagacatttcaaagtgatggtggatgggactcattttaaagatacgtttatggaatagtttgaatgaagcaacttggagcatcacactggccgtttcaatgacataaacaaggccaattaataatagtgagaattcacggtgtaagagaattgacatggctgccaacgccccaccaagggctaatgaaccaacgtcacccatgaaaatttgagctggcttatgattaaagattaagaatccaatcaagcccccaataattgttaagccaaaaatcgcaacatcgatttgattttgtctaaaagcaataatcgtataagttgcaaatgacacaattgccaaaccagcaaccaagccgtcaatcccatccgctaaattaaccgcgtttgaaaagccaaccaaccacacgatgacaaataaactaaagaaccaactgctagaaattgtaccgattaacggtatgttcagtgcgtggctgaaaccttcgtggaaataaaccgctaagaaaactgcgccacccaagatttgaccagctaatttttgccaagcccgcaaaccaaggttttgttttttgaagactttgataaagtcatctgaaaaaccaagtaagccatatagtactaggatgaataatgcgatccataagctattggtcaattgttgcaaccagatagcgacccagatactagaaattactgcggcaacgatgaacaccaacccacccatcgttggtgtaccgtttttcttagcgtgccacttaggaccttcatcacgaattgtttgtccctcttttttaaaccgtaaataaccgatgaataacggcatgaagatcaccgtaatcacaaacccactcattaggggtattaaaaattgtcccgttaacatgatataaactcctttaatccactcttatttgactattttaattgtaccttaatttgcttgacgccgtctaacaaactattaaccgctagactttgatgataagcataaccactgcctttgatatccacatcgatccccgttaattgcgctagttttagtaagtcattttttgaccaaccattaacatccggcatcgtcatcgcgccgttggtcatcaacaagacccgttggttcggcaaaatgacactgccggcttttggtaattgttgcacgacgagattaccgctacctaccaatgttgtctttaggttttgcgcttctagtttcttttgcgcatcctttgttgattgactcaagaccgaagcgactttaacttgttgttgcttatctttttcggcttccttcgtatactctagcgcccgtttcatcattggattaaagacttgcgataaaatggtttccgcactatccgtcatattacccggttgcttcattgtgatatataaaatgtatttaggatcatctgccggtgcaattcccgatactgagaagatatagttgcttgcaccagttaaatagccaccgttaggacccgtaatttgcgccgtcccggttttagccgcgattttatagcccggaatctggtaaacctgaccagtcccataatctttataaacgacgtcttccatattttgcatgactttcttagccgtgctggctttgattggttcaccggctttaatcggtgtgatttgttgttcttgaccaacacctgccaaaatttgcggcttaatcattgtcccattgttagcaatggcacttgtcatctgcaacatctgcatgacattgacgttaatcccttgcccaaacgaagtcgtcgcctgatcaagtggtcgttcatattgcaaggtgccggccgtctcacctggtaattcgatacccgttttcttgaggaagccaaatttttcaatataggacttccaagtcttggcacccatttcctgttctaatttgaccatcccaacattacttgagcgggcaaacgcttggttgagcggaatcatcccccacccagcggtctgccaatcactaattttcttaccactgaccaacacagaaccagatttatagtattgatctggattatagtgacctgaatcgatcgcagctgataacgtcgcaatcttcaaaacagaaccaggttcataaccatcttcgaccaaagtatcgcgccaaacatcaccaataccttttttagtacttgcattaaaagttggtcgttgtgaggccgctaaaatttcaccggtcttagcgttcattaaaacggcgttcatgctagccggttgatatttcttattaactttactcaacagactttctagataggattgcatccgtgaatctagtgttaaatacacatcttgaccgttcttagcggctttgactttgtttttgttctgattaatcgaatagccatacgaatccttcgtcaaattcttatagccatcttgacccgttaattgttcgttgaaatacttctcaacccccatgacgccaactaaatcttgactaccactatcttctgaacctttaggcgtttgtgcaatccccacaacgtgcgatgcaaaagtcccattaggatacaagcgtgttggtgattctttaaagtaaatcccggtcaaatgttgcttttcaatttttcgtttaatgctgagtgataaattctgcccggcactcccaaattcaacttggtaaacagctttatttttaggcgtcaattgcttataaatattagcttcactcattgggaggtacttgctgagcgccttggctgttttcttcttatctgctacgtataatggctttttatccgcagtcacataatcatgactcaaaaccgcataaacggcataggcgttggtatcttgtgctaaaacattgcctgatgaatcataaattgtgccccgttgtgcccgaatcacggagtcgccttcatatttcttgttcgatcgtttagttaaatcaacacccgcaatatgcccggttgcggcgatgtacgcaaaacgacccatgaaaatcagaaaaatcgccgcgataatcagcaataaaacttcgccaaatatgcgtcgattctgtcgtggactcctatgtgtcctaaataaatttctcatttagccacattccgaatattgttttcgtttaatttcagattatttttcttagcaaaggcatctaaacggtcggagcttgttaattccccgatttcttgttttaaatcattatttttagcacgtgtttgactcatatcttgagtggtattttctaatgtccgttgtgcattaaccaccgcgattttagtcgagagtaagcttactagcattgcaaaaaaagcaatcccgattacggtaacggctaatttttcaagtgtggaataagctactttttgagttgtttgttgcgctgattgacgagcaggttcttgaacctgactcggaatactttctggggtcgttagttggcgagctgcattggttgccatcataatcattccttctagtctatttctttttgtttttcagctactcttaacttagcactgtgtgcccggtggttaaccgttaactcgtcttctgttggtaggattggtttgcgattaaccagttttaaaacggttttttcggtgcccggcataatcggtaatcccttaggaatatctggtaatgtcgcttgttccttaaacattgttttgactaaacggtcttccaatgattggaacgtaatgatgctaattcgaccacccactttaactaatggaatggcttgttcaactgaatcttcaattgcgcctaattcatcattaaccgcaattcggattgcttggaaaatccgcttagctggatgcccacccgtccgtcttgccggtgccggaattgcctctttaattaaatctgctaattggattgtcgtttcaatgggtgcaatttctctttgttgttcgattttacgtgcgacttgttttgagaatttttcttcaccatatctgaagaaaattttaatcaattgttggtaagaccattcgttaacgactgtatacgctgttaactcggcgccttgatccatgcgcatatcgagtggcgcttcttttttataactgaagccgcgttgggcatcgtcaaactgtggtgatgaaacacctaagtcgtataaaataccatcaatcttcgtgatgccttgttcagcgagtgctgttttcaaaaatcgaaaattactcttgataaatgtcacttgtcctgcatccgcatacttcgctaaccgttggcgactactttcaagtgcgtggtcgtcttggtcaaatgaataaagatgtccggttgttaattgtgacaataagtattcactatgaccaccaccacctagtgttgcatcaacgtaaatcccgtctggctgaacatttaaggcatcaaccgtttcttttaataaaacactttgatgtttaaatgtttctgtcatattgttaccatcctttaaaaatcaaaatctaacatattttcagcaatgtcatcgaaattttcttcagcttcttcactaaagctcgcccatttttcttggctccaaatttcgattcgattggaaaccccaatcagcacacattccttttctaaagaagcgtgggttgataatgcttggggaatcataatgcggccctgtttatccggggtacattgcaccgcagctgagtagaaaaaacgcacaaaagcacgtgcatcttttttagcgagtggcagttgttttaatttctcttccaactgttcccattcgctgagtgggtaaccgaagatacaattgtccataccacgggtcaacacgaattcagttcctaatgcttcccggaacttggctggtacaatcaatcggttcttcgtgtcgattgtgtgatgaaattcacccatgaacatatacttcacccctttacccacctcaactcattttagtctaccataatcccccactttctaccacattttgactaaaaaaaaccaaaatcttatcttttaggatttattcccactaacccactagccataaccattttgcaccttaatagcactgcctattaacgacatctcgttcactagtgaacaatccttaaatagatcgtcgaaccacaacaaaaaaggcctagggcaaaataccctagaccaatcatttaattaattttagaagtttaagacgccggttgctgccaatgagccaaaaataacagagcctactgtggcgattaacataacccaaacaaaaatcttggttatccgactaaaagtacttgtttgtttcttcaacgattccaccacctagtcttttttcttatcagcagtttacaccgaatcaatgcaaagtgcaacttagtcctttttatcttttcagaaagacggtacaatggggatattaactttcgaggtgattcaaatgccatttacggctacgttattctttattctattaccgttaatttgtttagccatcggttacggcttaaatcttgtattgcaacgctttttcaaaaaacaacttcactttgtcgactggctacccgtgccatttttaataagtgccatcgcgcttagccaaccatttttcaacaaagctggttggtatttctgcttggtcatctgcgtatggggcatcatttggagtctaacgcggttttattacgaccatgcgctttatccccgcaagtttttcaaaagctggtggcgctatgtcttattaatgtcaggcgcttggtaccttgcctttctcgttatcgcattgattgtaaaataaaagtcgcacgccaaattggcatgcgacttttttgatatcatttattgaaataatcaatcagcatcgataaatcagtaatcgtcactgtcggttgcgccgcaattagtaagcaatcaacgtcaaaataaaccgtttgaagtccagcgttaatcccggcttcaatatccaacgcgcgatcgccgatcataactgtcttcgctctatctaattgataacgatcgcagaggtaattcaaactgtccggcgccggtttgcgcgcaaacccgttttggctagtgacaatctccgtaaaatactggtcgagatgatgttccgccaaatatttttgagccgctgtatcacgatgcgtcatcaagaagttacgcccggtctgactaacccgttctaaaatagccgccgcccctggataaggttgcggtgcaatttgcgtcttcgcctcgagttgatgatattgttggtctaatgtcgcaaatgcagtccccgtttgatcggctaatgcttgtaacatctttttaattgatgtttgtttaatcgctttgtacaaagcatcctgatcaactggtacttgttgttgctgataaaccgcaacgagcgcttttaacattactggataggtatcatagagtgtcccatcaaagtcccaaattgcattttgataagccattaattatccctcgtatcaaataaaatcgtcaccggaccatcgttgacaagggcgacttgcatatccgccccaaattcacccgtttcaacagtaatcccagtagccgctagtttttggttaaataaatgatacattttttgcgcataatcaggttgccccgcccctgtaaaactaggccggttccccttcttggttgaggcatataacgtaaattgcgatactgataaaatggcaccgtcaacttgccctaacgccaaattcatcttccctgcttcatcttcaaaaacccgtaattgactgatctttttgacgaggtaatctaaatcggcctctgtatcgtcatcgcaaatgccaactaacagtaaaaagcccttgttgatttgaccaacgacttgttcttcaattgtgacacttgcttggctaacacgttgtaagactactttcatgattaacgactcctatccttgcactcgtttaacttcgtaaacatctggaatatttttaacggcttccataatccgttcgagatgatcaatattgcgaatcccaaccgtcacatgaatatcagccattttatcatggtcaatccgccccatgacattgttgagttgtttgctgtgtgcattcaacacttgtaagacatcgtttaataaaccgccccgattgtaaccatagacctctaagttggcatcgtagagttgatcatgtttagcggacgtattttcccaactgacttccgttagtcgactgttcatatcggcacgatccacgatatttggacaatcacgacgatggactgaaacaccacgcccttttgtcacatagccaacaatatcgtcgccaggtactggattacagcacttacttaagcgtaccaacacattatcgacaccttcgatgatgacgccgtcttcatgcttaatcgtaatatgactaccagcagccttttgacctggtttttgagaatccttggccgataaaatttcagcttctagtgccttttgttcattctcttctttttcacgacgttccttaagcgttaatcggttcaagaccgcttgtgctgagatttcaccaaagcccaccgctgcaaataattcttcttctgaattaaaattaaagtgcggcaaaatgattgctaagctatccttgttcagatgtgccttcacagtatgaccttgttctaacaacaaatgttcaattgctgtccggcctttttcaacattttcatcacgatcttcttttttaaagtaccgttttactttattacgagcacgggctgtgaaagctaacttaatccaatcccgacttggtgtcgcactagttgaggttaacatcgccacaatatcaccgttacgtaattgataatttaatgggacgattttgccgttaatcttagcaccaaccgcatgattacccacttccgtatgcacgagataggcaaaatcaattggtaccgagccttttggcaactcgtaaacatcgcctctaggggtgaaaacgtagacgcggtcgctgaagatatcgcctttgacactttccataaattctgatgcatcatctgaggcatcttgaatttctagaatttcacggaataaatctaacttacggcctgattcatctatcttaatttgttccttaacgccttctttataagcccaatgtgccgcaaccccatattcagcaacgttgtgcatttcttgcgtccggatttgtacttcaagtggtttgcctttaggaccaatcaccgttgtatgaatcgattgatacatattcgctttgggcattgcaatatagtctttaaaacgaccgggcattggtttccacttagtgtgaatggcgcctaaaacagcgtaacaatctttaatcgagtcaaccactacccgaattgcgagtaaatcatagagttcttcgaattgcttgtgttgatcgcgcatcttgcggtaaatcgaatataaatgtttaggacgaccgtaaatttcgtagttcatgtccaaatcggcaactgaatccttgatgtcttcaattgcttcttgaatataagcttcacgttgtgtccgcttagaattcatcaaatgaacaatccgatagtattgttgtgggttaagatagcgtagcgaaatatcttctagttcccacttaatcttactaatccctaaacgatcagctaatggcgcataaatttccaacgtttcattagcaatccgccgttgtttttcgggtttcaaatgctttaacgtgcgcatattatgcagacgatcggctagttttaccataatgacccgtaaatccttggccatcgctaacaacatcttccgatgattttcagcgagttgttcttgatgcgatttatacttaattttccctaatttcgtcacaccatcaacaatgactgccacatcttggccaaacatctcttgcacatcacctaaggtaatattggtatcttcaacgacgtcatgcaaatagcccgacgcaactgtcgccggatccatcttcaattctgctaaaatacctgcgacttgaatcggatgaataatgtacggttcacctgattgacgtacttgttccttatgcacatacgctgcaaaatcatacgccttttgcacgaaagcaagatgctcagcattcatgtatttctgacatagctggatcacttcttgctgtgaaatcactttttcttctgacatcttgcccaactccaattccgactctactaaaatttgttttttaaacaacaaaactgactcaacagtttgtcgagtcagttttatttgcgacgttcatacgcagtattaatacccaagtaacttaataggaagtagattgggacaaaccaataattataatctgcgaagcggacaacaaccattaaggcaaataaaactggcagataaaaaatattataccaaggggcgtgtgttttctgaatgcgatagccgatgaaaaaggctgcacagccattaattgccataaacagcaacccaatgcgccacgttttactaattgataaccaaccgaaaacgagtggcaatacaacggcaaggagtaacgctactaagaagtaacggacccaaacttgctttaaaaagcgattatttttaattttatccattgtgaagcccctctataaaaattattattacctatcatactataaagtactcaattctgtcacatatgaaattgcgcttagtagatatagcggtgctgtttcggcccgtaaaattcgtggtcccaaaccaactaacaagaaacctgctgcttgtaaggcctcaatttcctttggtgcaatgccaccttctggcccaaaaacacagattaaactttgccctggttgcgctgattgtaggctttgaaccaattggccgtgttcaccggctttggctgattcttcgtacgccactaatttaatgtccgctgattcttcagcaattgccgttaaactcgcgcgccattcaatcaccggcacatgggttctgtgcgcttgttcagccgcttcttgggcaattttttgcagacgcgctagtttcttcacttgctttttagcatcccaacgtgctactgaaaattgactattacaaaagataaagcgatgtgcgcctaattgcgtccccttttgaacaatccaatcagtcttatcacctttagaaaggccacagacaatcgtcgtttcaatcggcagctcaacatctgtttccacggctgattcaactgtcacagtcgcttgtttttgcgtcgcatctgctgattgcaattgtgcgataaaagctaattcttctggcgtcacgatttcaatctgatcgccaacttgcatccgcatcaccttgagcatatggtgcgccgtctcaccggttaattgtaatgattgaccaaccgtcactgtttcttcaataaaataccgttgcattcatttgacctctaatcttcgtccgtctttagccgcgtaatcaaaccgacccaatcgcccatatgaaggctttcttcaaccattaaaccgttagcgctcaatgtttcgcgaatgaccgcttctttttcagtgataatcccagccaataataagtggccgccttcttttaataaggccggcacttgtggaatcaggggcactaagaccactggtaacatattggcgacgattacgtcagccgcaccagtaatgccgtgtaataaatcgtttggtttggcaatgatgccttgtgtaacggggttcaaatcaaaattagccaccgcggcatccactgcgacttgatctacatcgtacgcgcgaatatcttgaacacctaaatgagctgccgcaatactcaagacaccagaacctgtcccaacgtcgatcaattgttcaccgccgcgtaaaaccatttctaacatttgtactgaaagatgcgtcgtaggatgcgtcccagtaccaaaagccatccctggatccattcggattaaagcttcacgttcatctgttggttggtaatccgtccaactgggcacaaccgttaagaaacgggttagacgggttggttgataatactttttccatgcagttgcccaatcatcatcggccacctgttgtagattaacgctaccttcaccaattgataagccgaattccgtgagttgtaacacgcgttgacgaatcaacggtaacttttcaggaacaaaaaccgtttctgggaaaaaggcactgactgctgccacatctccgactaaagtatcgttaattgaggcgtcttcgatttgaatgccctcggcgccagcttcggttaaaatatttgcgatcgcttcaactgcttcattgacagttgcaactgtgactttcgtccattccatgtattctgctccttaatgattaaaacaggccaaaagaatttgacctgtcgctgaaatctattcttagtatttagggtaagtgtagtattttttagctaagtcatcactggcttgagcaacggttgcttggaaaaccgtgtcatcccagtccaagataaatgtttcgtcatctgattcatcgtttacaaaggcagctaaacgatcttcaccatcatctaataggtcttggagataattgaaaacaccacgcccgacttgggcattcaaaccttggcggccagaaaatggaatgacagctaaatagttatcagcatattcaaaaccgtcgattttgctttcatcgaagaataaaattgcatcttcataactaatttcatctgattcatttaattcgccattttgatcttcgacagccaattcttggctcttcgtcacatttaacgtgaattctaattcgatcgcccgtgattgtttatcccagttgatgttgatatcgccgctaaattgtaaatcatctaattctgcttcaaaaaattctaacatgtttttttcgaccataattgtcaccgtatcctttaatttgttcattcatcggctatcaataacagccgaacacctgctaatatcatacctgattacgcaatgaatctaaagcacttatcatctgaaacacaaaaaaagccgtgacaattgtctccggcttaatcgatttctgattgaaacgtccaattttagtcggcctttttttggccccaataattaatatccattgtattagcatcataacggtgaaattcaatgcctaaatcttcaagcgagtgactcataacccgcccgtataaacgcatatcagcttcttccgtattatccgctggtcgaatcgcgtgcattaaaataaacttcgccatttcttcttgaaccgatgggataatctctgacaaaggatcaaagaccatcgttacgaaccgaatctcgttgctatcaccatcttgcgtgagtgaaacaagtggaaaaccgccgaaattctgtcgctgtcctaaataggctagtaactgatcaatctgttctttggtaaagcctgatttataaaaaagaaaatgccaagtctgtctattcataatgtcacctgctcaaatttaaattacctttattatgccatatcagcggttgaaaaactaaccatagaaatcgcatgtaaaactgtgttaatttgttcacgttgtgtttcttgatcatgacgcgccgctaaaacttgcgcataaacttctttagaaggcccttcaaaagaatgaaccatcgtttctgttgcatcaacgtagtgttcaagtgccgtaattaattgctgattaatcgtgacaaacgcagttggtggttgcaccgcagcgacttgagtaacaaatgcccgcaggaccgttaaattttggtcaacgtaatgatccagggtcgctaacgtttcaccgactgtgcatcttcctaaaataatattcctacaagtttgcgtacactcgaaaaacaccgtttcaaatacaacgaatctctcgagcagttggttcacctgaaccacatagcttacagccggtattgtcttggttgtcatcgatatccgctcctttaatttttcaattagtcaataattgacttaagcatagattatcaaaataattggaatttattaaagaataagctcatacgaatcactattttttgtgaattggttgctgatatggtttggttaaccccgaaaaggccacccgaatcttctgataatgcgcatcgttatcccttgcttgactgaccaattgcgtaaaatcatgtgcttgaacaccacttactgtttcttgccgttttctaaaccatttcatcacaatcaactccttatttaaagtcattatacccctattcaacattaatggcggtccttaaatttacatttttaacaaattgccgtaaactaactataatcactaaaggagtggcatctattttgggtaaaaagaaaaaacaaggacaactcgcaaagacccttgtcgaaaaaatattagacaaacaaaaggtcgcctatacacaatttgagtttccaacacacgaagaacatcacgtcgcacaaatgcaggtcgatcacttggatattgatgaacatctcatctataaaacactcgtgctctcgggcaaacaaaccggcccaattgtcggtgtcgtccccatcgattgtcatttggacgaaaagaaactcagcaagatttccggtaataaaaaaatcgcgatggtccctttaaaggatctcgtagcaacaaccgggtacgaacatggcgccaatacgcccgttggtatttgggaaaaagcacattttccaatctatatcgaccaacaagccgaaaaagaacctttaatctttgtttcatcaggtaaaattggccgttcaatccagattaacccccaagacctgagccgggtggtctcaggcactttcgcagatattagcgaagactaaaaaaaggacatcaatttgccaatgtaatcactacaacgagtgatttaacattgcgaatcgatgtccttttttaattcatattaatctaaatagcctgctaagttgtgattagaaacaatcaccttatccttcaacaaggttggcgtcttcacaatattgtgaatgaccgtttgtggggtcacacccgcttgcgctaaagttgttagtgcatcggattttaccactaccttcttaatcgactgacatagtttgatcgttgcaacatactgtccctcatcttgcgcttcggtaatctcgtatttcccataaaaatgtttgttcacggtcactcatctccttgtaaaaaggataacacagttaatcgttttatacaaattactaattgtacaataaggtaaaactatgtgttcggagaacgattacatatcaccctacatttagattctatttttaatcacactctattattttctttttcttctatataattaaatgatttttataacaagttttgatatactaattaacaatgtgaaaaagtggttttatcaataattattattgagtccaaatactgacgacttaaaaagctgtatatattattggaggatttgaaatgagcactaaaattaaaggtgcagacggtaaagtttacaaacaagtcagcgagaatcaagaaagccaacattcacgtacagctgaaatgattttgggaatcatgggtggcgtatttgggattatcgctggtgtcttttcgttcttaatgggtggttttgacagtgcaatcaacaatacttcatcaagtagcttgtttggattgggcttcggttgtgttgtcgcaagcatcgttgcaattattttagtatgtatgattaataaaaatcgcgttgtgatgggttggttaatcattgtctgtggcattttaaatattgtttttgtttcagcatttggtgttttaagcggagtattaataattgtcgcaggaattcttgcacttattagaaaataattttttgggggtaataaattatgtcaaaaaaaattcaagatgaaaacgggaatacttttgtagaagttaaacctttgtataagcgctggtggatctgggttctagcagttgtcgttattatatttattttcgcagcactttcagggggtagcgatgatactaaagaatcaaatgcaacagctcacacaacaacttctgctgaaaaaggaaattctaaaaatagaaccgataattctaatagtttaacgattgactataacaaggttcctattatttcggaaaagacttacaaactttccgtatctgacactacttggaactcggcttctgtttctatttcaagcgcaagagtcattaaagtaaaaccttttgaatacaattcagaatccggtaaaaaggctgaaggtttaattattctaaatgtagcagttaagccttctcgtgatttaactgctacattccctgatcaaggaactatcattacaaacgacggacaacagcaggaggctattatgccttctatgaagggtgtaacaactaattggggtggagatatcgctaacggagccaataaatcgggtgacgtcattttcccactagaaaaactaaataatatttccgatattaaatctttaagatataagtttaatgctagctatgatactgatgattacgaagatgaaaattctaatcataactatgatttaactattaatttagactaattataaataccctccactctggtgagacagccgcgttcgattcgcggctggggattaggcgataactttccccatgaaaggaatcaataatggaactactactaactcaacacgaagctgatgatttaattgcatccctaaaaaaattaacacaaaaaacaactagaatcctaacagatggcgatcgcggaatagttaacatttcctcaaattctggaaggaaattttctttacggtacttctattcaagcaacaatattcatctacaatttatggatgaaaaaataaaattaactcttatcagaatgaatttaaatgatagttttcataaaaattctactggcgaaaagatatacggaaacagagttaatatattttcggaggatgaattttattcaaaaggagatggaacaacccatacaaaagcatcccctcttcccaagggcgttttaagaaatactagggatattctagaagcaatagacgacctttttaactatactaataccagcaaccgtgataaacttcaattaacaattccgcaaccattaaacttttaaattcgttagaaagggggataaaagatggatactcaggatttagaaataaaaagcatcgcaaacaactggtcttcttggatgaccgggcaaacaaatttcaaaagactagataataataaaatacaagttattacaccttttgtagataatttcggtgatggtattctatttaatattatttcgaaagaaaatgacatttatcaagttactgacgagggttataccatctggaatcttacttctaatggtattaatgtgaaatcaaagcaatctaatagatggcgaatactgctttctattattaccccctataactttaaaattggaaagaatgatactatctttaagttagttaaaaagagcgaactatctcaaacgataacagattttattcaggttttaataaatgtttctgatattgcgtttatgaacagaactaatactgctagtgttttttttgatgatgttagagattattttaatgaaagaagatctgattatagttttctaaatactatttatgctgatggtaaaacaagccaaaaatataaatttgaatacttgttcactccaaaaccaaatgaatttaaactaactaaaatgtacaataccctatccaaaaattctatggaagcaattatcggtatttggagtgacacttccgggttcagagagaataactatggcaccaactcctcattcaatattcttataaatggtatatccgataaagaaaaaccattcattgatggacttttgtctcacgaaattgatgttattgattttcagaataagaatgaagtaaaagataaattatctattaaataaaagcccctgttgggttttttatttgtcactcaaaagaacatacgtttgcgtttgtaagctaattatttatgttttacccattccattaacatttatctagatttatttatgtaatttataaaattaaccattaatttccaagtaagaggtgtccctatgtttaagtatgataaaaataacgctattacagaatatattagcaaaggcgaaagaagatacctgtttagaatttatgttggtattaatcccgagacccataaaaaatcagttatcactcgtcgagggtttaaaacacccgctgcagctaatgctgaatttcgtaaaatagaagctcgggttaagaatgataagtatgtatttaaattaactgattctcctgctcttacctttcatcaagcttatttaaagtggtttagtgaatcttaccgaactaccgtccaatctagtacaatctacaaaactaagcagatttttgattgtcacatcttaccagaaattggatccatcccactaaatgaaattacgcctaagctattacaaccaattgttaatcgttgggcagataaatacgctaatcgtatttttaagtatgcttacacaatcaatttaataacatcgaatcaaaaagataaattaaaatatgccttggatgttaactttgactaatcaaaatttagccaaaaaccgtaatttgtatatttgcaataattgactaacctgcttacttcatttttgactaaccctatagaagtgactaacctttttgactaacctttgtcggcgtatataggacaatatgactttttaaattaaacaaaaaaatagccgaatcactgatttaacagcgattcggcttacataggacaatataggactttagcttaaggagagtacaggatttgaacctgcgcgccggtataagccggttcgacggatttcgagtccgttgcattaccactctgccaactctccataacagtagttattataccagatttataacaaactgaaaaggcattattctaacctatcacccactagaacatatttatgccactgaccctatgatcttctaaaaaacgtcgcttttccgagcgacgtttttattttcttattttattggtttaaataattatatagcccacgcatggttgcatcgtctaatgtcaatggtttaccatccaatgtgacttccgcaatttgaacatagtcttcaaagtctggcacttctagttgttgatttgccacaaactcagcagctttttgataaattttttcggcactattttgaccatttacatatttaatgactaacattgccttcatctccatttcaacttttaaactcattgatgagttgctcatctttgacaaattcatcatacatcacttactaaaaataagaaacgttttatcttctattaaagttgcatggttccccctattcccttttccccccaactccgctatactaatactatcttatactttgacgatagaggttctctcagatgaaaatatcaccttacaagtttcctttcttctttgattttatttttttagtcgtgacgctgttccaatcggctttaattttgatcctgaatccaccattttctaatttcttaccgacctatatggacgctatcggtaaggtttggtggttagccttggtggcgattcttttgcatgtcatcgcctacttgttgtcattagaacaaaatatcgcacttttcactaacttactggcgatcttaggttatttaacgttaattatcattcctaattatttattactcgctattattttcttattcgccggtttagtactggcactcaaatcatatatcgctcgtaattaaccaataaggggtcgaggcaaaagatacttttgtctcaaccccttttttatcgttataaacgtgtcatttcacccaatcaaaaccctgttaaatattattttgtgatataattagtttgaagataaaactattaggaggtctcatcatgaaacggtattttgttattttaaatctcatctgtttatttgcgctcccttttgtaagcccttacttattcgatagaggcatcgcgcgcaatcagactcaaagccgggttagttttgaaacacaccgtggccctaaggctcatcatgcgactcctagcgataatgccgaacaaaacctcaataacttcaacaatcgtttcgaggcctacttcgatgaattaaaacaatcacctggtgcgctgcatgcattacttatcatccttggtctttcaatcattaccctactatgtcagccgctacttgctttgatggcgacccctaaaccggtccctatcaaaaaaacgcaaccggctgttccgaagaaaccacagattgcgtcttataagcgccatttattaagttagttgagactcaacttctgataggtgtaatggccctcttttaaagattggttggcatagggcgtttcatttaatagcgaaacgtattccttagcccgttgttccgagctaaacgcgcggatcatcttactcttctcataatagagtgggtttgcttgatacatgacaatataaatccaatggttcatttttcatcacctaacttacaaaataaccacataaagaaaggccgcctcgcaatgagtcggcctttttaaatgtcatcttaacgacgagcttctttgatacgagctgccttaccacgtaatgcgcgtaagtagtataacttagcacgacgtacacggccatgacgagtaacttctaatttagcaacacgaggtgagtgtaatgggaaagttctttccacaccaacaccgctactgatcttacgaacagtataagtttcactaacgccaacaccgtgacgtttaataacaacaccttcgaataattggatacgttcgcgagtaccttcaacaacacgcacgtgaacacgtacgctgtcaccaggacggaagttaggcatatctgaacgtaattgtgacttagtaatttcttgaattaatagattcatctgaatctctcctttttcacagatattcattaacgtcttgcgccagcggaataccgttgttttatgacttatcatcacagctatcaattttagcataaatcaaacttaattaaaaggcttatttttcagcggcctcttgtttaatttcacgtaaccatttttgttgatctgcggttagatcaaagttttccaataaatctggccggcgttcataagtccgtttcaaagacatcttgtcccgccattgattaatgagcttatggttaccgttcatcaatacttctggtacttttaagccgcgatattccggtggtcgtgtgtattgtgggtgttccaacaagcctgttgagaacgaatcggtgacggctgactgttcgttacctaaaacacctggcactagccgtgaaatggcatcaatcatcaccatggcgcctaattcacctcctgtgacgacgaaatcgcctaatgagacttcatccgtcaccaaggtccgaatacgctcgtcatagccctcataatggccacaaatgaatacgaggtggtcttcttgtgcaaattcttcggcaaccttctgattaaaagtaacaccagcaggatctaataaaataacgcgtttatgaccgggatttttagcattcacctggtccatcgcttcaaaaataggttgtggccggagtaacatccccgcaccaccaccataaggcgcatcatccaccgaattatgtttattgactgagaaatcacggaaatcagtgacttctagatcaattaaatctcgatcgatggccttaccgataattgattgcgataaaccattttgaaccatatctgggaataaacttaaaacatcaatcttcattatcaatcaatccttctggtacttcaacgtaggccttacccgcttcaatatcaatttttttaatgactgacttcaaaaatggtagtaataaatcggagcgaccgcgacgtttgataacccacacgtcattaggaccgggatcgatgatttctgagaccttaccatagcttgtcccctcagattcttcaatcacttctaaaccaatgatatcgccgtagtaatattcatcgtcttcaagttgatcatcacgttcacttgccgcaattttgaggttgtgtcccttaaataattcgacgtcgttaatgtttcctaagccttcgaattgtaataggtaaaattgcttatgttgacgcattgcagaaaccgtgactggtgttaagccattaggcatttcaaccgccaagtgcgttccctttttaaaccgttcttctgtaaaatcggttgtcgcaatgacgcggacttcaccacgaataccatgcgtattcacaattttaccgacttgatagtatttttctggcatttaatttctccttattcaacaaaaaacgcttaaacaaaacatctctgcttcatttaaacgtttgattaggcatctacaatatttaagcgaacgcgtttttgataaggtgttttcacactatagacaatggtccggattgactgcgctacccggccttgcttaccaataatacgcccgatatctgatggattaacctgtaagtcaaattccataaaacgttccgtctcatgttcagtcaatttgacatcatcgggatgttcgacaagtggctgaacaattgcaataattagttctttcacgtctgtcataacaaatccctactttttagcgaagcgagcttcgtgatatttttgcataatcccttgttttgataaaagattacgtactgtatcagaaggttgtgcgcctttttgtaaccagtccatgataacttcttcttctaacttcaagtcaacaggttctgttaatggattgtagtaacctacttgttggataaagcgaccatcacgtggtgaacgtgaatctgcaacaacgatacggtagaatgggcgttttttagaacccatacgtttcatacgaattttaactgacattaatgccacctcctattaattctttaacatgtcataatataccaaattttaaaggccgtgtaaagtgttttttctttacagggcgaatttttttaagatttaaaacgacgtgcgttcttaagacgttttttcttgttcttcttttgctttttcatcattgagttcatggccatcttgcccattttacccttgatgccgttgcccattaaaccttccatgccattaaagttaccttttgacatttggttcatcatcttcttggattgattaaactgtttgatcatccgattaacttcaacgattggccggccagcaccagcggctaaacgacgacgacgacttgggttcaataagtctggattttcccgttcttgcggtgtcattgattgcacaatcgccttcatgtgggtcatatccttaggatccatcttgatatttttaagttgggggttattagccatccccggaatcatcttcatgatatcttccaatggtcccatattttgcaattggtccatttgatcgaggaaatcgttaaaatcaaagctattttctttgattttttcggccatatcaaccgctttttgttcatcgtaatcttcttgcgccttttcaatcaagctcaacatgtcgcccatccctaagattcggctactcatccgatcaggatagaagacatctaattggtttaatttttcaccttgaccagtgaacttgattggcttaccagttaccgcacggattgaaagggcagccccaccacgtgtgtcaccgtctaatttagttaagacaacccctgtgatgtctaagcggctgttaaagccttcagcaacgtcaaccgcagcttgcccagtcattgcatcaactgttaacaagatttcattaggatgggctaaatcgttgatatcagccaattcttgcattaaggcttcatcgatttgtaaacgaccagccgtatcaattaagacgtagtcgttcttttgtaaagcagcttgtgccaacccttgacgtacgatttcaaccggattaacatccgtccccatttcaaagactggggccccaacttgttccccaaccgtcttcaattgatcgatagcggctggacgataaatatcggccgcaatcatcaacggccgtgctttttcatttttaattaaataagtggctaatttcccagcagtcgtggttttcccggccccttgaagcccgaccatcataataatcgttggaatttttggtgatttgttcaacggtacagccgtttcacccatcatcttggttaattcttcatcaacaatcttaacgatttgttgtgctggtgagagactctccaacacttccgttccgattgccttttccttaacgactttaatgaagtccttaacgactttaaagttaacatcggcttctaataacgctaagcgaatttcacgcatcgcttggttgacgtcagcttcagtaaccttccctttacgacgtaatttacttaatgcaccttgtaatctttctgttagtccttcaaatgccattaatgatcattcctttaaattgatttattgttcagtgagattcagcaagtctgccaagagtttggctaattgctgatcatttggatactgagcttgaatatacttctggagcgcgtctgcactagcgttttgctgttcgtaattttgaaacagatgcaacttagcctcatagccctcaagaattttttcagtccggcggatattatcataaaccgcttgtcgactgacttgatactcttcggcaatttcgcctaatgagaaatcatcgccataatataatgagagataactatgttgtttcgccgttaaaagtgcgccataaaattcaaatagtgaattcattcgtgcgttttgtgcgagttccatttgacgcctccaaatagtagattgacctaagtactagagtacctattttgacggggttagtcaacttttattccggattagcgcactaaaaaacacactctaaattgagtgtgttttaaattaatctagtgtgtctttgttttttgaattaagcgtgcgatattcatacttgtttgggttaaattagccttggtattagccaacgctttttccaatgacatgacccccggtgttgaacaaaagatactatcaatgcctaaatcatagagcacgtcagttccttcaccgatattaccggcaatcgcaatcacggttgcttgcggattaaccgctttgaccgcttgcgcgacaccaattggggttttcccatattgggtttggaaatcgatcccaccttcaccagtgacgacgatatcggcgtctgcaacagccgttttgagttgcgttttttcaatcacaatttcaacgcctggctgtaattgtgccttcgtaaaggccaacaaaccagcgcctaagccaccagccgcaccggcacctggtgtttgcgcaacactgatgcctaaatcacgttcgataatggccgcgtagtgcgctaagtttcgatccaactgtgcgaccatttcaggtgtcgcccctttttgcggaccaaagacggctgaggcacctttttcaccgattaaaggattagtaacgtccgacgcaatgacgattttaacgtccgctaaggctggtaacatcccagttgcatcgatgcttgctaagtcagccaaagcaccgccaccagaccctaaggattgctggtcggcgtttaacaattgaacaccgagtgcttgcgccattccggcaccaccatcattggtagcactgccgccaagaccaataataatcgttttaacaccttgtttaacagccgcttcaatcaactgacccgtgccatatgtcgtcgttactaacggattacgcgtttgttcattaataaattggatcccactagcagctgccatttcaatgaccgccgtttctcgatcgcctagaatcccatattgcgcagtgactttttgtcctaaagaattcacaacttcagccgttagaaaacgaccgcctgtggcatcaaccatcgattgaacagttccttcaccgccatctgccatggggacttcaacataagtcgcttttggaaaaacttttttaaacccggcccgcatcgcatgactcgcttcgatggccgtcactgaatttttgaatgaatctggcgctaatacaattttcattttatttacctcgtcactaacgtcattttacaataacaatcaaaaaatagcgactaccaccagttacctgatgataatcgctattttcaatacctattgtagtaacaatgtaacgtagaccgtaattattaataaatcagcactaccaccaagactataatgcccttgagttgcctcttgatctaattttaacagaccttcttgccctattgatgttttgacacccccagctgcaacaatcgcagttgcttgtgcctgaacatcttttagtgtctgtaaacgaccacttcgcttcactaagttggaatcttccgaaacactgatgattttcatcaatgtattcaataagcgtgtattccaatcaccagtttgttttcgcaaataagggtaggctgcttcaaaaatcgttggatagccagcttgtgcttcaccacgaatgccaactagaccgtacttaagatacattttttcaccattggtaagttgtgctggcgatttttggtgaagtgttttgaaatcattcttcactagtccagccaacatcttttgaaccgtttggctgagtgctgttgcggataatgcgtccttttgttgcagatagcctgttgcactcaataaaatccccagtgagaaaatcgcgcctttatgcgtgttaacgcccttagttgcttggaacatcgcttcttcagcctgaatccctaatggccgaatttgtgtcattaatgacgttaaatcagcctgattaaatgttgcgcctacgcgaacaaattgttcaaaaaaaggtaataacacgacactactatcaatgaatgtaaagaaatccatatccatatgtgttttgtgatcaattggatccaccaaccctggtttgggataacaactcacttcgtataaaagagcgcgctgcgcaagttgcgcaatttcttggggtgttttcatctaatcagtctccataaataattgatattgttggttaatcgccgcttgtaattccgccaccgtatgacggcgacttctagcacaaactttagcaggttgttcgcataataaacagcgccgtgttggttgtcctaatgcttgtcgacttatcggttgcacttgttgtaaatctgattgccaaatcaaaacatcaatatcaaataatcgccctaaagcatgtcgatcctcgaatattgccgcttgttttttaatagccaagggcgacccttctacgattaaaaaggtctctgggccagttgatttcgaccaatctatttgtcgaacaacaactagcttttgtttaaaagcagctagtcctgccaagaataaacgtgttaagtcagcattattcttaataggtcctggaatattgagttttaaagcaacaacactctgcgtttgactagcatctgcaactaattgattttgtaattcaactcgctgatctcgattatttaatactgcggtaatctcttgcgggattcctgttgcaaatagattaagcattttactagtccttcacttggtaaacgacatccattaaagtgccatcacgatattcaatcaaagcaactggcttatctgtgaatgctaatggcgccgcttgaccgacaattttagcagctttttgacgaagttcttcaatcgtaaatactggtacaccaggaatattagctagtgcttcaagtaaatctttccgtttaggattaatcgcaatccctaattctgtcactaaaacatcaattgaatcaccaggtgtaacaactgtcgtcacatcatcaacaaccgttgcaatccgacctctgacaattggtgctgaaataatcgttaacttagcattagcagcatcttgatgaccaccgattgccccacgtaaaacaccgtctgagccagtcataacattaacgttatatttcgtatcgatttcaagcgctgataaaatgcagacatctagttggttcaccgctgcacccttattgttaggatctgcataccaagaagcatcaatttcttgttgattttcggtagtagccatactatcagcagcacccttatcaaaatcttgaacatctaaaattttgtcaactaggccttcgtttaataaatcaacggtaggtttggtaatgccacctaaagcaaatgaagctgtgattgattttttcaacattgattcacgtaaataacgtgtaacagctaatgcagcaccgcctgaacctgtttggaatgagaaaccttgtttgaaataaggggaatgtgtaataacagcatttaccatttcagcgatttttaattccttaggatctttagtaaagcgtgttgcgcctgaaccaattttctccggatcgccaaccttgtcgacttttaccacgtaatcaacttgcgtttgtttgatgctagctggtgtgttgggatatggcataatcgtgtcagttaataaaatgaccttatctgcatactgtgcatccattaaagcataacctaatgaaccaaaaacagcatcgcctttaatcgcatttgcattaccgacttcatcagaattaggaacacctaagaaagcaacatcgattttgatatcaccactttcgatggctcgtgcacggttaccatgtgaacgtaaaataacaggattttctaagccaccatgtgagactaaatcacctaattcgccacgcatcccagatgatgtaatatgtgttacaacacccgccttaatcgctttaacaaccatcttattcatcacatttgtcaatgaacttggtgctagagttaagtctttaaacccttgatcaatcaagatttgcataactgcattaaagacatagtccccttcacggaaatgatgatggaatgaaatagtcataccatctttgagaccaacctttttaatgacgtcttcaattgacgacactaatttagcgtgaccttgatcaaccgttactttaggcgccacacgttgaatttcgggatgcccaatttcaacagtttcaaatggttgataacctgttttcttcattaattcatctggtaattctcgttgtacattattcagcatgccaatttccctcctgatcaactaagtgtgatgcttctgctaacatcatcgtccgttgtgcgcgagcaacaaccggtttatcaaccatcttaccgttcaaggcaataacacctgaacccttaatccgcgcttcttcaatggcatttaaaacatcttttgcattttggacatctttttcagttggtgcataaattgcattaactaatggaatttggcgcggattaataactgacttaccatcaaaaccaagttcatgaattaactcaacttcgtgattaaaaccggcttcgttgtcgacatctgaataaacagtatcaaaagcggcaataccagcagctctagcgccatgtaaaatcatattccgagcaaatgataattctgccccatcaggataacggtgtgtcttcatatttgtaacataatcttcagcaccaatcgcaataccgattaaacgatctgaggctttcgcaattgcgggtgcatttaaaacaccttcagcactttcaatggctgccatcatcttagttgttttaattgggatattaaaataagcttcagcttctgcaatcactgcttctgtttccaagacatcatcaactgtttcagtttttggtaaacgaataacgttcacgccagctttaaccattgcgaagatatcaggtcggccaaatggtgtttccaagccattaattctgacaactaattctgtatcaccataatcaactgtttgcaaagcttgcatcactagcattctagcggcgtctttttcagcaagcgatactgagtcttctaaatcaaacatgactgaatcggcgccataaatccctgcatccttcaacataccagggttattacccggtacaaacatcattgtccgtcgtaaacgttccattagcctaatacctcccaatctggatcattttgtttgtcggttgctcgttgaataactgtgattaagcgtgctttaatcgtacaatctaaagcccctttatcgactgctttaatcttaacgtttgtaagtccatattgatctaggattgtttgcattaaagttcgaatttgtgtcccaaattgtttttcaacagcactttctaattcaatttcagttggtccttcaattttagaaagcatgatttgaatatcacttgattctagtgtgcctgcaattgctgtatgtttaatttccatcaacttgcatccctttctgaattctggcttgtaaaatagcctgattttgtttaataaattgatacgtcgtttctggtacaaacgtatggattgtttcaattgtgccattttgaatggcttttctaacttgtgtcgctgaaatagtttgtgttgctgctttcagccttggaattacttcaacggttatctctggcggtaaagtagctttcaacgcttgattgtaaagtgccgttgttttagaaaatggttcttcccctaagaaacgttgctgaatattcaactgcgcggcaatttttttaaacaactgtgcatccaaagcagtttgatattcaattatatcttgtgactctggtaaaaaatatgaggggaatgttgcgtaactaaccatataatcactactttgtaccacgattacatttggcaaatcagagagaccttgttgaaccaatttaaaccgttcttcagttgtaaaaagtgacacatcctgactaacgacaaaaacatagacaaaatcactcttttgagtagcctgtgtaaccaaatagcgatgccccaacgtaaatggattggcattcatcacaatcgcactaatcgttgcagtagattgattttcaagacgtggtacctgtgcaataaattgttgtaaggaggcatctccggcttccaataatacggctaaggaagtttgagccaaaagtttaaagcctacgaattcaaagctttgtcgataaatcggctttgtaaaaacaaagaaatgaaaaaccccttgctgcgttaatgtattgatcagcgccgaaataatgtcgttgaacaacttaccgccttgatagttcgcatcaacggcaatatattttaaaacatttttttgatacgcaccagtagcaatcagttgttggtcttcaaaaatgccaagacagccgtcaacatcaacaggtacttgtggtaagccttcgataccctcttgtgtgagtaacgcggcccattgtttatagtaatgtagctccttcaaattcagttgtttaagttgttgagagtaattcattaaaagctccttttaagcaaataatcgcatcaagaatattgataatgttacggtaatggcaccacctaagcgaacagctacttgtgcaaatggcattaagaccatccgatcgccagctgccaaaatcgctaaagcaccggttccgccttgaccactacaacatgataccgcgattgccgtatcaacaggatacattcccaagaacttagcgctaaagaaagcagcagcgacaattccggtaactgtcacaacaattgtgatcaacattggtacgttcgtaaagaccgtaatcaatgatttccaaggtgtcattgcaaccccaacaccaaataataatggcggtgtgatgcctttaaccgttaaactatacaatgaactcccaccagcttgtaagcttgccggaatccaacccaacattttagcagccatcacaacaattaataaaacaattggtgctggtaaatgaataacactattgacccaaactcctaataaataaagcgcaattgctaaaatacctgataccaacattttttcgatatcagcaccgtttgatttttgtgttaaattatcaagccctgattcagcttcatccgattcaacaagacggccgttcccggttaattctgggtgcacatcaccgatttttttcaaaatacccgctaagataactgctactaaactacctaacataacacaaggtaaaatcatggcaaaaatcttaggttgcgtcattgaaataatagctgcgtaacctaatgatagtggcaaagcaccttcaccaacgccaccggccataattggtgcaataacatagaaataactcttccatgcagaaaggcctaataatgttccaactgcgattcccaatatcggaccaacaagttcacaaattaataaaacgacaataattctggtactggccttaatcaaagttttacgattcatcgcactgatactaccgacaattaataaagcaatgaaaaatgctaagaaattgttgcgcgtcataaaattcgttacaacatgaacagtactcttaggtaaccaattctgataaactaaatatgatggtaagaaggtaaccaccaacactttcccgcctaatgatttcaagaccggaatgtgtttaccaacttcttccagaataaatgaaaataaagtcatgatgcctaaagcacctaacatatcatctggcatttgatttcccattgttagtaggacgtagccaagtgttaagattaaatagagtggcatcggaataataccaatgtgtaatgcaataaatttttgaaataaattctgattgtttacagttttctttgcttccatatcaaagactccattctaaaatcattatttatactgctttactgcttcaacaactgtttcaacgacaccctcatcaaagacaccgggtactatcttttcattagttggcgctttaatcatattagctaaggcttttgcaatctcggcttccataccagtttcaaagtggttcacatggttctcaagtaagcctctaaagagtcctgggaatgctagaatattattaacttgatttggataggctgagctcccagtcgcaatcactgcagcgcccgctttttgcgctaatgccggatcgatttctggaattggattggctaatgcaaaaataataggatcagtcgccattgatttaaccattgcttcggttacgatttccccaactgataaaccaatcaatgcatcttgatcaactaacgcttctgctagtgtatgcgcatccgtgtttggttgaacggattgaacaaacttcaattgataatcatttagactagtactttgatcacgaaccacacctttttgatcaactagtgtaatgttttgaatgcctacattagccaatagctttgctgttgctagtcctgaagcgcccgcaccattaacaacgacctttaaatcagtcaatgatttgccaacaactttagcagcgttaattaagcccgctaatacaacaatcgctgttccctcttgatcatcgtgatatactggaatatccagtacttgattcaattgatcctcaatttcaaaacatctaggtgctttgatatcttccaagtgaataccagcaaaacttttactgatattcttaactgtttgaacgaattcaggaaccgatgtttgatccaatgcaagtggaatcgcatcaacacccgctaattccttatataatagtgcttttccttcaacgactggtaagccaccttggggaccaatatcgcctaacccaagcactgcggaaccatctgtaataattgcaattaacttaccactaaccgtatattggcgtgcgagggatggatcttgttgaattaatttacttaatccagcgacacctggtgtatatgctttacctaaatctgttctatttttcacaggcagttcaccataaatacttaaaacgcctgtatgcttctcgtgcaacgcttttatctcatcaagagtcatttgcataacctccaatttaaaatattttaaaaaaataatatatttttaaaatattttaaattaataatacttctaattcttcattttgtaaatagaaagcgttatatttaatatgtaatattttttcatctatttttttaacaaactaattcaaggagattactatggctgaacaaacaaatactgatttattgatcaatattgcgcaagatttctatatcaatcaattaacgatcgcagatatctctaccaaatatcaagtcagtcgttacaaaatttcaaaatatctagatgaagcattggctaaaaatatcgtttcaattacgatccgatcacctttcgctcgtagtcaggaacttgaaaaacaactcagtatcagctatcctagtcatcgcttctacgtacttgctaacactgaaaagaacagcaatgatgccgaccgtttttacgcctttgcagctcaaaatgttcaaagtctcatcgaacccttaaaaattattggactaagttggggggacactgtttacaacgttattgaacggttcaaaccaacaaccaaggaacaactcattttcacacaatttatgggtgaaaatggcaaatataactcgcttgccggctcgatgcgcatggttcaaaaagcagccaataaatataatagtcaatattcaacattaaacgcgcccctctacattcttaatgatcaagtccgccaattactagcacttgaacctgcaatccagccaaccttaacaacagcacatcaaatggacctcattctaactactttaggaacaatggagtccttagaatcgattcctagttggcatgatagtctagccgctttattccctaatatcaaggcaaaacaggttgttgggttactttatggccgaccattcgatcaagatggccacttcttaatcgattctagcgctgataaaacctttggcatttcaatcgacgatattctcaaagtccctatccgagttgccgttgttaataataaattcaagagttacgctgttgctgccgcattacgaggcaattttttaacagacgttattcttgatgaacccacagcaactaagattttagcgtcaaacgtttaatgataaccaaaaaggcatcaagacaagttaatacctgtcttgatgcctttttaagcttcaataaacgttaatagtacctgattaaacatgtcagattgttcagccatcacaatatggccagcttcttcaattatctcaaagtgaccatcagctcccatttgagccactacttcagcaaatgcaggattaaaataagggctttttttacctgcgattaccaaatatggccgcgtactctgtcgaatgacatcccgccaatcctgaaatgcatgatccaccaataacggtaaatcaagttctctatcaaatggttgttgctgtttaattgcagttaccaattcgttagtcgctgtatcaatcttccgataggttgtacgaccaaagtctaatctgagttgtattggaaatttggtccaatctaagtccttaaaaccataatgccaagtttcatcagcaatcatcttaggtgactggtcgacaacaaccactttagccaattgttgatcagaataaagtgacatataagcccagatacaagcagcacccattgaattaccaactaagattggtttgactaatacaagtgatgcaattaattccgcaatatcttttgccattcgtgacattcttaatccttttaccgtatgctgcgctaagccttgattacggacgtctagctgaataactcgaaattgacgagcctcaaagaagattgcttgcgcatgccaaatttctttggaagcgccaaagccggctagaaaaacgattggttgccctacaccaacatctgaataatcaagtgacactttatcagaagttataaatttcatttaatcgcctgactaacatccgtatcaatctcactttgtgggccatccccgacaataatgtctttgaataaaccgtaaacaaagcggttaggatcgaataattgtaagtcattcatttgttcacctagaccaaccatcttaactggcaagtgtagctctgtccgaacagcaaggacaatcccacctttagcggagccgtccagttttgttaacacaattccggtgacgtcagtggttgatttaaactgtttagcttgaaccaaggcgttttgcccagtcgttgcgtctaatactaacaagacctcttgaggggcgcttgggatttcacgcgtaatcacgcgtttcaccttttcaagttccttcatcaagttgacgttattttgcaaacgaccagccgtatcaactaataagacgtcgaagttttcttctttagcccgcttaacggcatcaaaagcaacggcggctggatcactgcctgctttattagcgaccactggtacagaaacgcggcggccccattcttgcaactgttcgattgcgcccgctctaaacgtatcaccagcggcaagcaagaccttcttaccggctttttctagttggtgagcaaacttcccgattgaggttgtcttgccggcaccattgacgccgacgaaaagaaagactgtcaattcaccttctggggcaaaatgtaattcattatcttcttgttgtccttcttgaccgtatagatcgactaatttttcaacaatcgcttgtgaaacggcttctggtttcttaacgttgcgtaacttcacttcttcacgtaattcgtctgcaattttcattgctgtttcgtaaccaacatcggcttcgattaacatttcttcaacgtcgtcaaagaaagattcatcgacacttctgaagttagcgaacaaggcattcaaccgttgtccaaaagtcttccgtgatttttctaaaccttgatcatatttttcagtttgagctgcttgaacgggttcagcttctacatcatctgccaccgttgtttcttccgtagctgttggttcatcggtagcaacaactgcctcttcaggcgccgctgttacttcaggttcaacaacttccggttctggctctgtttcaactggtgttggtgtctccgcgaccactggttcagttggttcttcttcgactggcacttctggtgtttctggtgtttctggtgtttctggtgtttctggtgtttctggtgtttccgtctggttatttttttacgcaattagaacaaaaaacacctcaccgattatccgatgaggtgtttatctgttatttattaaggagaatgagagattcgaactctcgcgtgggcagaacccacctgacggttttcaagaccgttcccttcagccagacttgggtaattctccatatcaatatcttacaacgtttattataataccaagtctgacaattaatgtcaactcaaatttactaagttatttaatttttttcaatccggcttaaatccccctatttacaggaggctatcaacacgttatcatgaaatggtgcatttgaaatcaagcgcctaagccccgcttggactggttcggaaacttcccagaataaaaaactaaggatctcaaggaggttagaaataaatgcaaactcgcaaaattattattgattgcgatccaggcatcgatgacactctcgcgttgaatttggccactcaatcgcctgaagtagaagtcgttgctttaacgattgtttgcggcaacgtccccgtcgaaattggcgtcgacaatgcctttaaatgtctagaacgactcggtcgactagatatcccggtctacgctggtgcggcccagccgctcaagaagacctttgttagtgctcaagatacacatggtatggatggtttgggcgatagtcatattccccgccaaacgactaccaaggccgctgagcaatcggcagccgattttttagcgacgacttttaaggcaccttgtgatattagtattatcgcactcgggccactgaccaacattgcgaccgcgctaacattaaatccccaattgggggccaattgtgcgcggttcgtttcgatgggtggcacctataaaagtcatggtaattgctccccagtggcggaatttaattattggagtgatccggaggctgctttggcggtctatgaacacctcaatcagaaaatcgaaatgattggcttagatgtcactcgtgagattgtcttcacgcccactttgttagcttattgtcagcggatcaatcctgaagttggtgactatttagccgctattacgcagttttattttgatttccactggcaatatgaacatatcatcggctgtgtcattaatgatccgctcgcagtcgcctatttcatcgacccgacactttgtcagggttttgaaagctacaccactgtcgaaacaaccggcatcagtattggccaaacactggtggaccgcttcgacttttggcaccgtcctattaatagcctcattttaactgaggtagatacaaatcgtttctttgaacagtttttgaccgtcgttttaaatgcacaggcttcaatcattaaaacggacttaaaaaaactcagataggaacaacctttaatgaaaaaatttaaaacgcgccatctaacaattatcgccttggcaatcgccttaaattacgttggcagtaacattgcgctcgtcttacggttaccaatttacctcgacagtattgggacaatccttgccggtgccttactagggcccttagctggcgcattaacggcgactgccagtagcgttcttagtggtattacgactgacttattcgcgctatactatttaccagatggccttttaaccggcttactagcaggttggtttttataccaacatcaacgtagtaaacgcgaaattccgttagttgccattggcgttgctttgccgggcactgtcgttagttcactgattacttatttcctattccacggtattacgtcttcaggttccagcatgattgttcaactactcagtggcctcggcctcaatcaattcgcgagcatcacgcttgtccaagccggaactgattacttggaccgtttgttggcaattgtgattgtgacccaagtttgttaccacctcaaaaagcaaattgcaacactctagaaactaaaaacaaggcccctaaaagggaccttgtttttttatgcttgcattaataacttcacgtaacgttctaagtattcttgatcaactgcatcataagcgccgacttcgcggctatcgagatctaaaacgccgatcaattgcgcgtctttcatcattggtacgacgatttcagagcgagctgttgagtcgcaggcgatgtaattttgatgtttcgtcacatccgttacaatcacagtcgcttgttcagcagcagcttcaccgcagacgcccttgcccattgtaatatgcatacatgagacattgccttgaaaaggccctaaaactaactcattatcttgatacaaataataaccggcaaaaactgtttctggtaacgtttggttcaacaaggccgaagaattagccaaattagcaattaaatttgtctcgccttctaataatgctgcttgttgcttgagtagcatttcgtaagcgccacgcttagcttcagttgatttaaataacatctcataaccttctttttaggctattataatcaaaattgcgtataagcgcaattttttaacattttatctattatgttcatctgcaaatttagtatctttcattgctaatgccgcttcttcggttggataatagtgtccatacgagcttcgactagcggtttcaagtattgataacactggcatactcttgccattaatatccctatccttaacaccgtagagcagtcctgcaccattagtttgataccatccgtgaacggttaaccattcccgaccatcaaaattaatcggatcaactcgtccccaattcattttagcggaattgggtgtggtctgattaattccaatagtcccgtttactaacccacgttcttcagtattcatttccgaactactgtgtaactccgttgtatgatcaggatcaatcatcttattgccagctatttgtaatttagtaatttcaccagtcgcatcactactataccaagttccctcgaacgtagctggaacttgataacccgcttgcttcgtattttcttttacatcactcgctgctttggtactttctgaagttgaagttgccgagccaccaccgacaatttgcgcaaagttttgttttaagtcagtattggctgtttctttgaaatgcacaagaccatctggcatgccttgattttgttctgtaatcaagaccaccggttggccgtcatgaatcgtaaatagatatagatgagccgacatatcgtgcgcagccgcactgtctgaataaatccccacgacattgtaatcgttgctgccagtcccgtctgctgaccaatcagctgtcacgtgttgatcatcaacagctagtttgtcttctttaaagtaacttggataattaagcccaaagaaatgggtttcattacccggttgataatccgcatattgttgattcatcgcttgactaaaactggccatataggtcttcaacgcttgtgacttggctgatgaccagactgccttatctgaagacgatgtttgtgttacttgtttacgactcacttttttagccgagctagtcgttgttttcttcgccttttttgatgttttaacttgttgactcgtactgctgcttttggctgttgacttaggtccttcaaccttttgactgcaccctgctaataataagagcgccgctgcaccaaataataccccttgctttttcatataaactcccccattgtacttgaatatgataacggttttattatagcatattatgcaaatcttgctttttttgaccacaaaaaaagccgccttcttcggcgactttcttcatgattaacggaactgctgaatgcgttgtggcaatcgtgcaatcactgccacaatcagcccactttttaatatttcaattgggacatagggcgcaaaaccagttaagaaactagcttgccagcctaaatgaagtgctattctcaaccacaacgtgccaattaataactgacagaggctagcgagtaaattaacactaaacatcacgcgccgtgaacggccaaaataatgcaaaccataatgcacgatgccaatatagatgataaagccaaataaataaccacctgtcggcccgacgataacactcgccccaccggcaaaattagcaaagactggtaatccaactaatcctagtaatagataagccgcaatgaccgcactactcaactgtaatggtaagacggttgcaatcagtccaacagctagtgtttgaagtgtaatcggaacaatccaaatcggaatactaatctgggcacaaacaattaataaggctagacatacgccgatatagcttaaccggcgcgcaactgatactgacatcgcaattcctcctgctcattaatctgcaaaccggactcgttgtccaattcgcacgatttgttgattacttaaaattaatgtaccatctggcttgagtgcactcacacttatatcttgaactggttgtccggcaatcgtttgaagcttacgaccaaccaaaggcgtccagcgctgataacgtcgtgttagttcaagggctggtaattgtaagagtgtatataatcgattgagatactgggcactaaattggttaatcgtgacttgctgtgccactactagcgcccgcaagttaccaatgtgttcagtttcaatcgttgaggcaaaattaagcccgacccccaccacaacaccacttaagcggccggtgacatccaggtagccctctgttaaaatacccgccagtttttgctgctgatcatagacatcattgacccatttaagctgaacttcataatgtaataaggcttgaattgtctcagcaagtgcaacacctgctgcagccgtctgttgaaaggcattaaactgcgcggaatctctaactggcatcaaaagacttaaataaagaccaccaatcggtgatgcaaattggtggtctctttgcccgcggccctgtgtttgttgttgtgctatcacgactgaccattgctgatcacgcattggctgttgcaacaaataagcgttggttgatggtaggacttgctgaactgagagggtgagcaaatcgcgtagttccggggaaagtacccgctgtatctgcgccgcctcgattgtcattaagtctattgtaaatgaacgcctttgtcaacgtagataatgtcaccagtcacaccggttgccatatcactgagtaagaacccagcgacattcccaacttcttcaatcgtgactgattgaccatcaacagttcgtttttctgattcttctaataatgaacggaaatctttaaccccggtcactgcgagtgtcttgatggcccctgcagaaatggcattaacgcgaatttgatcagcgcctaaatctcgtgctaaatagcgaacactagcttctaatgatgctttggcgatacccatcacgttgtagttaggaacagcgcgttctgaaccaaagtaagtcattgtcacaatgctaccatttggttttaagaggtcacgaccatatttagcgacggcgattaatgaatacgcactgatttcttgggctaataagtaacctgaacgagatgtttcataaaccttaccctctaactcttcacggttggcataggcgatcgcatgaacaatcccatcaatttgacccactttagctttgatttcagcaaaagtttgttcaattgcggcatcatcgctgacatcacattcaaccaataagcttgtttcagggacaaattttgacaaactatgtttaattcggtcgttttggtaggtataaataacctccccaccagcttgtgtaattgcttgtgcacatccccacgcgatacttctttgattagcaacgcccatcactaggattttctttccatttaacacgtttctgacactcctttttttcgttaaaattgcctaaatctggcttgtcgattggccaataaagtctcgacaggtaattgttgtaattgatttaattgttcggttaagacggtggttatattttgacagaaaaggtgttcatctggttcttcttgaataatcccttcaatcacaccggcatcttgtaaagattggggtgttaattgcatgattgccgccgcttcatcagcgcgctggctatctttccataaaattgaagcaaacccttctggcgataaaatggaatacatactctcagtggtcatccaaacttgatcgccacaggcaagtgccaaggcaccacctgagcccccttcaccgaagattacgctaatcatcggtgttttcagagtactgatttcatataaattattggcaatcgccattccctgaccagtcgcttcagcgtgcgccccgggataagctcccgcggtattcaccaaagtgataatcggacgtttgaatttttctgcttccttcattaaccgtagtgctttgcgataaccggcgggttcaggacaaccaaagtgacacgccatacgttcttcaagtgttgtccctttattagttgcaatcaccgtcaccggttgattattaaataacgcgataccaccaataatggctggatcttcgccgccgactcggtcgcctttgagaatcattaaatcatcaaaaaggttggccaataatgccggtgtcgttattttttgactactacgggcgccggcgacaatcttagcggctgtctttttttgacgattaataatgagcccctctttcatgtaacttcaacaattgatgaagtacctttttttgatcctgacgtgctacgatttgatcaataaacccattttttaagacggtttcagcatcttgtaaatccggtgcgatctgttcgtgcatcgtctgttcaatcacgcgccggcccgcaaagccaatcaccgctttgggttcggctaaaataatatcggcttccgttgcaaaactagctgttaccccaccggttgtcggatcggttaataagctaatatacaacagtccttgttcggcatgctgtttaacagccgctgaggttttagccatctgcatcaaagaaaaaatcccttcttgcatccgagcaccaccagaagccgcaattaaaatcacgggtaagcctttttcagttgctagctcaaaaagccgtgtaattttttcaccagtcgcactacccatgcttcccataataaaataagggtccatgatacctaatgcgaatttttgttgtttaatagtcgcaacaccggtcagaatactatcttctagtccagtgatttgctgtgcttttcgcaatttctgcggatatttgggaaaatggagcggattaggcgtttgcgctagatcgccggctggttcaaaactatccaccaaccaatctaggcgaaccttagcccgcgtccgaaatccatattgacagaccggacaagtccggtaataaccaaggtccttatgataaatcgattgctgacacttaggacaggcaacccataaaccgtctggcaccttttgtcgtgcttcttgattatatttaagatgggctttaccgatattacgaacggcattgaataattgcatggtgcccctccttttaatctgttgctaatgacgttaaataatccgtcgtcgcttggctacttaaaaagaccggatcttctaataacgtttgttggaactgtgcattcgttttaatccctgagacaatcaactcgttgagcacccgatgcattttagcaatcgcaatttctcgcgttgcgccccaagtaattaacttgccaatcatcgcatcgtaaaacggtgaaattgcataaccactgaataaatgcgtatcgatgcgcacacctaagttaccagttggtaagtataaatagttcaccgtaccagccgatggggcaaagttattgtccggatcttcagcatttaaacgacattcaagcgcaaagccacgcgtttcaacggcagcttgatcaaatgataatggtgcccccgcggccaccaaaatttgttcccggacaagatcgacacccgtcaccatttcggttaccggatgttcaacttgaattcgggtgttcatttctaggaaatagaactgatgatcttggtccattaaaaattcaacggttcccgtattttcataattaatttgttcagccgctttgagtgcaattgcgcccaattcagcccgttcatccggggttaataaagccgacggcgtttcttcaatcaccttttgtttaaagcgttgcattgaacaatcccgttctgggaagtagacagcattgccaaagtgatctctaaaaatttggacttcgatatgtttaacgtccagcatgattttttctaggtacaattgatcattgccaaaagcaccagccgcttctaattgtgcttgcgcataactgtcagcgagttggctttcatcatcaacaaagcgaatgcctttgccaccgccaccagcgacggctttaatcattacgggataaccaactttagcggcgacgattttagcgtctgcaagactttttaatgggccatcactcccaggaatcaacggcacggcggccgccttcatactggttttggcctgacttttatcccccatctgcgcaatcacttggctagaagggccgataaacgtcacgccacaggcttcacacatttcagcaaattgactgttttcagatagaaaaccgtaacctggatgaatcgcgtcgcaaccagtcccaatcgctgcggataaaacgttttgcatatttaaataggattcttgtggtcgattaccgccgatgcagaccgcttcgtccgctaattgaacgtgcaaactacttttatcggctttagaataaaccgatacagagggaatgcccatttcttttaacgtccgaatgatgtgcaacgcgatttcgccccgattagcgactaatactttcttaaacatcgcgtggtgcctcctattcgataataaatgttaattctgcggtacaggctttttcaccatcaaccgttgcgatcgctttaccgaccccaatccgatcttttaatttttcaagtgtgactttaatttcaagtgtgtcgccagggcgaaccacccgtctgaatttagccgacttaacgccaccaaaaaaggctgtccgccctttaaattggtcaagcgttaataaagcgactgcccccgtttgggccattgcttctaaaatgaaaacacctggcaatactggattacctggaaaatggccttggaaaacagcttcgttgattgacacgtttttccgtgcaatcgcgaattcacctggttcgaaactcaatacgcgatcgattaataacatcggataacgatggggtagaatcgcttggatttcttgactatctaacatggtttagccttctttcactttaaatagtggttgttggtattcaactaattcttcgttttgaacgaggatttcagtaattgtcccagccaccgtacttttgacttccgtcatcatcttcatggcttcaatcacacaaacgacatcgccaaccgctacagtttgaccaaccttcacgaaagctggatcagcaggtgctggttgtaaataaatactcccaaccagcggtgcttcaatcgcaattgtgtcatcagcaacagccattggtgcttcagtgctctcagttggcatacttgtcattgacgttgtgggtggcactgacggcgctacaggtgcgtgttgcacatcttgaacgcctcgtttatttaaataaagtttgatatcacttgtttcaagttgcatttcttggttgcccgattgattaaacaaggccaccatttctttgacttcatcgtagttcatttaactaatcgctccatttcttcaacaacaacacagcgttatggccaccaaagccaaatgagttactcataccatattgtgcgtctggggcagctaatggtgtcttaattaagttcacgtgacaatccggatcagtattttgtaacccaacgttcggtggcaaagtaccggcttgtaaagcaccaattgtaacgattgcttcaagcgcaccggctgcccctaataaatgacctgtcatactctttgtactgctgacaggaactgttccttcatcaccaaaaacacgtgccaaagcagcagattctgctaactcattggcaaccgttccagtgccgtgtgcattaacgtaatcaatatcggccgctgtaatcccagcttcatcaattgccatttgcattgcacgagcagcaacttcaccatttggattaggcgatgtcatatggtaggcatcacaattggtcccgtatcctgtgacttcacctaaaatggtcgcatggcgtgcttgtgcgtgttcaagactttctaaaattaaagtggcgccaccttcacccatcacaaaccctttacggtctgcgtcaaaaggcaatgaagcccgcgttggatctgtcgcggttgataacgttgataacgccgcgaagccaccaatcccaatttcattgattgaggcttcagaaccaccggtcaccatcacagtggcccgattttctttaatttggcgataagcttcacctatcgcattagccccacttgagcaagccgttacgattgttgtacaaatattttgcgcaccgatttcaatggcgatgttggccgcagccatatttccaattgatttaggtacgaagagtggtgagatatgatcagcacccttttcaaccatacgcgtcacttgttcttgaatcgtggttaaaccaccaatcccagaaccgtaaatgacgcccatgtcggctggtacggtattttcgtcgttaataccggcttgttcgagtgctgctagtgcactatcaagcgcgtattgtgaaaataaatccattcgctttgcttttttcttgccgattcgtaatgccggatcaaaatcaagaacttcggcagctaatgacacacccgttgtggttgcatcaaactttgtaatggggccaatgcctaattcgcccgctagaatccggcgtgtaaatgtctcaacgtcgtttcctaaaggtgccacaacgcccattcctgtaattactactctcgtcatcttaatccctcacttatattgtcatcccgccatcgacagtcaaaacttgccccgtcaaatagtcattttctgctaaaaataaagcggccgatgccacttcttctggttgaccaaaacgctgtaatggaatctgcgtcataatcgcttctttaacactcggttttaagaccgccgtcatttcagtttcaatcattcctggtgcaatcgcgttacaccggacgttgcgcatagcgccttctttggcgacggattgggtgaatccaatcacgccagctttactagcggcgtaattggcttggcccatattaccgtgttggccaatcacgcttgaaaggttgataatacaaccactgcgttgacgtaacatttttttgaaggccacttgggtcactctaaaagtgccgaccaagttgacatcaacgaccgcttggaaatcttcaacggacatcgccatcacgagtttatcgcgcgtaataccggcattattcaccaaaacgtccaatcgaccatagcgttcaaaggtttctttcaccaaacgatcagcggtgtctgctgcggtaatatcgccttgtacgaataaataggtcacgcctaaatcttcgattgcttggacgagttcagcatccaatgctgaacgcgcattaagcacgagttgataacctgctgctgcaaatttgagggcaattgcccgaccaataccgcggctaccaccagtaatcacggctactttttcatttgaagtcattaatgtgcgccttctttcaaggcagccacgacagtttcaaactgtgcgctactgctaatattaaatcggtctaattgagggaccgtttgacgtgcaaacttgctaagtgcgttgcccggccccacttcaataaccgttgtcacctcttgcttagccaattgtgtcaggccagtcgcaaaatgagtaggttgatacatctgtgcggttaaggttgcttgtaagctagcgacttcaaaaggttgttcagttgtattactgatcacgggataaacgccctctttaaaagtgacttgcgctagtgcttgttcaaattggtgcgccgtttcttcaaataaagcggtgtgaaaggcccctttaacgggtaacggaatcactttaggcgctacttcaagcgtttcaaataacgttgttaatgcctgaatccccttttgagtcccaccaacgacgatttgtttggccgaattataattcgcaatcgccaccgtttcaccagtcttttgaatcgtctcgcaagctgcttgaatttgattaatatcaggttttaagatcgcaatcatcgcgccaggatgtgcttcaacagtcgcttgcattaaagcaccacgcttggcgactagcggcaaaccggtcgtcaaatcaaacatgccactggcaattaatgctgaatattcacctaagctaagccctaaggcaccagctgttgaaacccccgcgtctgttaacatgcggctaatcccaacgctcatggctacaatcgccggctgtgcataacgcgtttgacctaataaatcagcatcattcatgattttttgtaaatcaagttgtgtcagctgactcgcttggtcaatcgtgtcgcggtaaatgggataatcttgatataaatcattccccattccaacggcttcgctaccctgaccgctcattaaaagtccaattttaaccatcatctgtgctcctttagattgctaaatgtccattttgaaactgactcttgcgcttaacgatatttgtcaaatcagcgattccatcgccaattcgccaaatgcggttaatgctcagagtcaaaccgtttcaaacgcactctttatttgtttattgttttttcgatgtagtcaacaacgttttgaaccgttacgattgattcgtctggatctaatttaagttccatgtcatcttctaattggttcattacttcaaagatatctaagctatctgcatctaaatcttcacggatgttcgttgttggtgttacttggctttcttcaacgtctaattgttctgcaataactgcttgtactttttttaagatgtctgcttgtgtcatgattaaaaccccttataattaattaatttttttagtttatttttaataacgaataatttgaatgccgatggttaacccaccgccaaaaccacagagcacgcataaatcaccgcgcttaatttggtttgtttcgacttgttccgctaataatagtggaatactggcagccgaagtattaccgtagtgctgtaaattcattggaaacttggttagcggttgatccaacatgctagccatttttgtaatcaagcgtgaattcgcttggtggactaagaagtgatcgatttgatcaagtgtcaaaccggcttctaggaccgccgcttcgatcgccttaggcacgcgccgtgttgaaaattggtagattgctttaccggtcattttgaaaaaatcaatcccgacttgcgtttgaccaacctgcccgaaattaggccgtttaaccggtgcgtaacctgaaactaattggtcactttccgtaccaatcgtgatcagcttttcactgacccaactctcttggtcagaggtagtgccttgtaacaagacacccgcagctccatcaccgaataaaacggcagtactgcggtctgaccaatcgagcattttggaaataacttcgccaccgatgaccaaaacgtaatcatctggtgtctgcacgtatcctcgcgcagcagataatgcgtaagtaaagccggaacaagctgcgctaatatcaaacgcaaatgcttggtcagcccctaatcgcccctgcacaatagctgctgttgaaggtgtgtaataatccggcgtcatcgtcgcaacgataatcgccttaatttgtgaaactgcgataccgctcttgtccaataacgtttgtgctacgcgtaagcataaatcagacgtattttccgtttccgaaatccgtctttctaaaatacctgttcgactttcaatccattcattagaagtttccataatggccgttaaatcgtcgttagtcacaatgttggcgggtaaagcacttgccgtttcaattattttaaaggccatttgttaacctctacttttttccgaggagatcatcacgcggggccacaacaaaggttagctccgcttcacaaaccatttgaccattaacagtcgcattggtttggacaactcccatattttcttttttcttagttaatttaaccgtgaagacgatttgatcaccgggccgaaccgtttggtggaacaaaacgtttttagcagcgcctaggtaagctgtcttcccaaagaattctggtgattttagaattaatattgaagctgtctgtgccaaggcttcaatcattaatgtatttggcatctgtggtgaatcgggacgatagccacgcatgaactgttcattaatcgtgacgttcttgattgccaccacttcttcaccaggtactaacgactcaacagtatcgatataaataatcgggtaccgatttggaattagcgccataatctcagttgtatttaagagtgtcataatgcctccccattgattatttaaaaatgtaatacggcgtatcgcatttccattcatgaacaataccatatgttttttttgaagtcaattcgactttaaaacatattttacgttgaaatatcgcataaggtggcggaaaagccgatttaacgcgatttgtttatgccgtatacaataaatttttaaaatgaataaaatacaaaaaaataccccaatcattcgggagaaaccgaaatggttggggaatcgtcttttatgttttggcgtttaatacgttaatgcttgccactgtttcttggtcatcttcgtgaagtgttcttttctagtatcatctaatagtgggttatacatttcatcaatcgtcaattctggttggaaacctaatttttcttgtgcgcgctttgattgttggttcccgtcataataaccacaccaaatattatcaagtttaagcgtttcaaaaccgtatgctaaaatcgcttttgatgcttcagggattaaaccttgaccccaatatgggacaccaatccaatagccaatttcggcatcattctcacccataaagggttggccaccaccatttttaactaattctaaaccaacactaccgattgcgtgttgcggtgctgttttcaaattaactgaataaattccctctgccattaaatagttttgaatgagttcgcgactattagcgacgctagtgtgcaccgaccaaccggcgatggggccaatcgctggatcctttgcatattcatagattgcttgatcatccgtcaattcaaatggtctgaggattaagcgttgtgtttcaagttgcatattactttgcctgcctttttcctagtattttaaccgctaagtgtttgccagggctcaaaaaagtaccccgcgtttcaatgccaattaacggtaagttttgatgagtcgtgatggctgataaggcgctatcaaattccgcgccgctagcggcttcaattgtcgtaaaatcataacaaccggcggcaatgtggtagtcgcttggcatgggcgttgcgatacaaatcgcataatccgtttcgccaatcacataatacagctggcggaccatcaaatcgggctgccaatcaattgcttcaactaccgataaatcaaaatcttgcgcaaatggtagccgttttaaaacgcgcaaatgaattgtttgattgacctgataagttgtgtcatgagtcgcttgttgtaattgctcatcaacggttcgctctaacgcttgtaaccgggcaatttcttgttgcagcgcctgttttttattcagaagcatcgtttgttctggataatccgttgttaaaatcaactttatttcagctactgataaatctaatgcccgcaaaaatagaataaacgataattgataggcctcggccataccatattgccgatagccattctcagcgattttcgctggcaataacaaccccttatcctcataatgccggatggtgtactgcgttgtcttaaataatttggcaaatgccgaaatcgtcaataacttttcagccatcttctcacctcacaaaaaagtataaaccctagggtaacccaaaggtcaagagagtgttattcacaccggtttacttttgaacatttacgctacttggcgaattggcgtcaaagacgccggtttgacaagtctcgtaaagcgcagaaagttggtgtgaataacacgtttccacaaaaaagctttacccctcacgtcagaccacttcaaacgcagttttagccacttctcgtccgttgacaatcagtgccacgttatgttgccctggatagtgtttccgagtcgtcaaatctttaaaattaatttgtcgttcaccacttagtccttggcgaccatcaatttctttttccgctagcttaaataacttacgcgactgttgaccattggccttcacataatctactgcgtattcaacccgaaccagtagcttggcttccggtctaaagcgaatctgatagtgaaacgctaatttatcaccaatggctacagttgtcgcggttgttttgatggttgctgatagcactaacgggtttgcgggactatcggctgcatacccaaataaggtttgaaccgtcaagaaattctttcgcaataacgtccggcaaccatgccgaatcacccagtcaaccgcttcggattctccctgccactttttagccgtttcaatcaccaattgtgggtggtccttagcgatatcgtttaaattattcgcgacgctgcgtcgaacgtatagttcaggatcatttttaagtcgttctagaatcgctaagaccggtgtcggatcttgtttaaataccggtaaagattctccccaaggtaaacgtggtcgacagccttcactcgctaaacgccgcacatgggcattagcgctttgcgcccattgtgtcatttggaccattgcgcgttttggatccgttaaaataaaagtccgaatggcgaactccgctgaagattgttgggtaaaaatctcaagtgcgtgcattgaaagcgcccaatcctcaggacgtgtgccataaacaacaacgaaatccgggaaaaaaagataggcaaagccctgacaatcaggtgccagttgttctaaaagtgcaatcgcttctgaatagtcctgtggtaagaattgaccgagtacgatcgcaatctgacgtgtccgttgtttcaatgttaaatcggcccaattatcagctagaacggccctcacaaattgttgcgctttaaagggccgataaacttcttgaacttgctgactaaaggtcgtcagaaatgcttctgtataaatatcttttaacaattcagccattagtaatgcctccgttttttcactttcttctatcataccgttcttaacggctaaaaaaaacgcccatcaatgatgtgcgttttttgcgatctaaattaaaatacctgccactttcacaattaacatcaaaccataaccgataatgattaatgcgctaaggatgttaacccacattaggaatttaggtaagaccttatctctaaaaatactaaacaaaatggcaatgccgaagaaccaactagcagtcgccgtcacaacgccgataataaatggtaatgattgactggcagtcatatcaccccgtaaggcccccagcatcaacgtgccatcaatcaaagcttgtggattaccccaaacggcaatgaaggctgttaaaattacttttttaagcggaattggctgtaatttaccaaattcgacggccgcccgcgcgctccgtaaaattgtatagccaatccacaaaatcaacagcccgccgacacccataatcgtatacttaataatctcattttgaataatcaacgcaccaatgccataaaaggccaccacggaaaagagcgcatcaaataaccaaataaacaaactatttaaaaccgcgcgccgtgtcgtatttgacaatgcattgttaaatacgaaaatattttgcatcccaattggtgcgacaaacgcaaacccaattagcatcccttttaaaaaaatcatccaaatcctcctctaaaatatcacgaaacagtttttatgcctaaaactgcctataaacctctactttatctgaaatcagcggtgacgtctagtcctttaatttaacttatcgtcattattcattattggtgttatcataatgaccgttattatctattcgattagtcaattgttagcgatataatttactacactacgttaactgtttttcttgtaaaaacgctttcttatcgatacaataaatattgaaaggtggttttaaattatggtcaaattaacgttattcgacaacacaaagatcgtcctcaaagacgatgacgtcctatgcggaacagcagcggatgcaccgcgcactaataaacttgctattagggactttccccatcaagatattgtcgcgttcataacgcatttcatcaaagaaacacctttatttatcgcaaagcgcaatcctgatattatttattcgagtgcggatattattgaaatatcaatccgttcataacccaattattcaaaaagaaccctcagttatggctaactgccaatattgagggctctttttttagaaataatctgagaaataaggttgttcaaccggaataatattctctaagtttttaagcgtttgttttgtggcttgcaggcgttcaattttagctaaatatgatgggcgtcgataactcatcaacatggtcgtcaacgtttgaatatcacaaacgaccttttcaccaaccggccgactcgtaacatggacttttccttgctcatcccaatagacaccaaatgtgccgttattccattcagctagtggatccgttaattcaatatggaatgcttgcccgtccgtttcaaacggataagcttgtaagaattccttagcatcaacaatccgcgccatgaaatagggtttgatggtctgctcaatgtccccatcatccaataggaacgtaattggttcatcttgatagagattgcccttaacgtggtcgaccattgaataatgcgcaccgataaagttccataaaccaatccgtgcttcttgattcaaataaatcatttctttaatatgaaagacttcgttagcgatccaataaaggacgtagccagttggttcttcgttttcatcataataaacgccggcaatccgttcttcttcgttttcccaacgccaatattcatcccaatttaactcattgcgaatcatagcgccatgattgcgaagcgcgaatttatcatacatcataatcacatcagcatcatcaatgtccaaacgttcaacatgcccgttaacgggttgttgctttggtaattgactgtcgcgaatatcataagtcagatgatcggacataatctcccagccctttttacgataaaaaggaatgctgtaaggataaagataggaaatccattgtttattttgccgcatttgatctaagccgacttttactaaatcatgcattaaaccgtggccggcatattctggataggtgcccacaccggttaacccagccattttaaaaatttttccatgaatattaacttcacaaggataaattgcgagttgggaaattaattcatcgccattaaaccaaccaatcacatctgatttttctaagaccggccgtttagcacgttctagttcgccttcttcataaccactatcagaaacttcctgatcggttacctggaaaacatatcgtaataagtcattaaattgttctaaatactcgattgtcacgggtctaatttctaaattagctcgctggtcagccattgtttcgcctcatttttatttaatcgtttttcttattatacactacttagcacttgtcatgaatgtgtacggcgttaaatccgccatcccaatcatcgggtcaatctgatgaccactcaccaaggctggtgttaattcataattagcaggtgcttcttgaattgtttcttcgctgtcatctgcatcgtccactaatgccaattgttctggcgctgctgctttagccggggttagtttttcaacagttggtttagcttccgttaagccaacactagcggttttgaccgcttggctcactttttcgccattaaagacgctgataatccgttccttaagcgttgtttgccgatttgcggagagttccttggccgccttatcaaaagcacttggttccccaattaaaatcagtaaggaccgcgcccgtgtcactgctgtatacaacaagtttcgtttcagcatccgttgatattggttaaccaagggtagaattaccatttcaaattcagaaccttgagccttatgaatcgacgtacaatacgccaacgtaattttatgccattccgtccgtttataggtaatttcggtactatcaaaggcaatcgttaactcgtccatcttgtcatcactatctttagcatacgtaatcccggttatttgcccgatttcaccgttaaaaacgtttagttccggactattaaccagatgtaaaatcttatcgccaatccgataatgaacgttacctaaactgacttgtttcttacgatcatcgacctttggattcatgatattttgaatcattggatttaattgatcaattccggctgcgccccgatacatcggtgctagcacctgaatgtcttttgtttcaaagccccggtcttttgctttagtgaccacttgcttaatcaccgattcaatctgataaggactgcactgaataaagctccgatccttttgcggttggagtagatcggctggtagttggccctgattaatctcatgagctagcggaataatcgtcgactcatcgtcttgtcgatagatttgttgcagttcgattgccggaattgcctgactctgcagtaaatcaaaaaagacttgccccgcgccaactgatggcaactgatctttatcaccaacaaagacgacttgcatattgctaggcactgctcgaatcaatgatctaaagaggtacgtatcaaccatcgacatttcatcgacaattaataagccgccttctagttccttactatcgatatcaggattattttcacgtcccgtaattcctaataagcgatgaatcgtgctagctggcaagccagttgtttcgctcatccgtttagcggcccgcccagtaggcgctgccaataaaattgggaatggtgtgtctttatattcgttgatatcaagcgaaagaccgtttaactcagcaaataaagtcacaatcccattaataatcgttgttttcccagtaccagggccccctgttagtagaaaggctctgtgagtcatcgctaatttaattgcatttttttggacatcatcatagctcatcttaaagcgtttttcgagccggcgaatttctttatccagatcatgtttaggataactaattttatcccgttcattttcaatccgcatcaagtggttggcaatttgccattccgcgttgtacaaaccattcggataaatccgattttcatcaccaacgactttgccatcgtgtgccaagaccattaattgctctgccactaaattcggatcaatcgccacgttccgggcctgttccatcaattgaatgctggctgctaataacggcttcgcctgggtaaacgtatcgccggcctgattggtcagttcgttcaaggcttgcatcagcgccccttgaatccgcgctggtgaatcggctgcaaacccaatcttctcagctaaattatccgctcgtttaaacccaataccggcaatgtcggccactagttgataaggattttcttgaataatcttcaaggtatcttcgtgataagtttggtagatgttataggccatcgagctcccaaaaccgtaattattgagaccaatgataatttgttccatgccattgttaatcgtcagcgtttcaaccaacgtcgcttgtttcttatcatttaaacccagcggcgctaaaacagttgagtccgctaagatcttatcaatcgcatctaatcctaaggtatcgacaattttctcagccgttttttgaccaatgccggcaaatttttcgccagataaataggcgactaagccagtcttagtcgtcggttggtcaacctgatagttgtcagcttgaaattgttgaccgtatttaggatgggtgatgactttgccataaaacgtatagcgttcgtcttctttaatctcaccaaaactaccagtcacgacaatctctggctcgtgccaatcgattgtcttatgggcaattttaatcaagagaatcttaaaaaagttaccgggattctcgtaaaaaacactttggaccgttccggtaacggttggtttattatcgaccgtattttctgtttccaaaatcgccatccctattatttctgatctttggcgcgtataaagccttcaatatcaatcagttgttgtttatttttttcaaagtatgctgaatctaatgttttggcacgttcaaaatatgactggctttctcgaccaagaactagctgcgttaacccatatttgaagactgcttcgccattttgagcatcaatgcgatgtgcatttttaaagtaggtttgtgcttgatcaaaatcgcctaaactaatcaaaatattaccgactaggatattagcatctaattgatctggttgtttttcctgaacagtgagtgcaaaggccattgcccgcgcattttgttccaattgatgataagtttgtgccaacatatattgcgcatctagtgcttgggtctccttcaccaattgcgagaaagtggtctcagcttgttgataagcttcagcttgataatagagtgtcccgagtgcatattggagcgcgtcgttttctgggaattgtgttagcgctttttgtaaaagcacttcagcttgttcataatctttgagggtcgtcaaaaaagtcgctagtgtgacgtacgcttcgatatcagtgggtgttttttctaaataatcgactagctgttgaacggcttcttcgtgttggccagctgcccatttttttaaaatttcgggtttcatcaaatcatctcctaaatggtatctgacgcagaaagtgtgcggcttaaaaaggacgtttcgttccaatccaatagttcaaatgactgaccttgatcagtcgtttttaacgttgtgacagatgaattcgttaaaccaccgtgggcacgaatatctgccaagggtgtttttaataacgcctgaatcatggcaactaatgccgctccgtgactcacaattaaaatctgatcgtctggtttagccgtggccataatctgcgcaatcgccgcagttgtacgtttgattacttgcgggaagctttcaccattaatgacgctcgcatcatattcagctggtgcttcgcggaaagtccgtaacgtttccgggaaccgttcctgaacttcagtaaaatacatgccttccattaaaccaaggtcaaattcgtggaggccatcgaccaccgtgatcggaaaatcttggtgtaaatcttgtttaagagttgctgacgtcacgcgcgtgcgcttcattggactcgtatagagatgggcaaactggatgtcttttaaatagtcggctaactcaccgatttccgtataactagaagccagtagtggtgaatcaccattcgcaccttgatagcgccctgccaaattccattcagttttaccgtgacgtacaaaatataaggttgtcatacactttctcctcaaaataacttacttttcattatgaaagagtcatcgcccaaattcaagtctatcctattaaaaggttgttttttataacaaaaaaggcaccgggaaaaatttttcccagcacctttaaaagcgtctcacgtattttttgattaatgactttcagcgacagctttcattgcaattgcgttgacgtagttcaatggttgatcgtagttaggttggaagaacatatcaaccattgctaattgatcaattgtcatcttcgtttggatggccattgaaatgacgttagctgcttgtgcaatgtcatattgacttgtaaatgagccccctaaaacttggcgtgtcttaggatcccatgttaagttcatcaaaacaggtgttgttgatggcatgaagtctgggcgataatcttcagtcaaagtagttgtcgcaactgccatcccgcgaaccttagcaccttcaactgtcaaaccactaccagaatatgtccgaccgaacaattcaacggctgatgttgcttgcgtacccatgtatttttcagttggtgtttcgatattgcggccaattaacaagccttggcgaacagcattagttgccaatggaatgtaatctgctttttgcgttgggttatagtatacagcagctgaatcgccggcagcgtagacccctttaacagatgtttgcatatattcatcagtcgtaatcgcaccgttgcctagcatttcaacttgatccttgaagaggccagtatttggtctgaaaccaacacataagattgcaagatcagctgtgtattcgttcttatcagtcttaacagttacttgatcagtacctgagaagctaactactttttcgcttaaggctaattgaacgccgtgatctctgtaatcttgttcaacaatctcagagatattaggatcaaagtttttacccagtgcatgtggtaaagcatcaatcaaggttacttttttatcagttgtcgcataagcttcagccaattcagcaccaatgtaaccagaaccgatgacaatgacgctcttcacatcaggggcactcttcttcaattcgttagcatgttcccagtttttacataatttaacgttggtattatcaataccttcgattggtggaatcactggtgatgaaccagttgtgacaataattttatcaaatttttcaattgtttcttcagaagtcactaagttcttaacgtgtaagactttttctttcaagtctgccttcaagacagtgtgttgcatcttcatatgtgcacccaattgggctaacatttctggacttgaatagaacatttttttaggatcagagacgtggccacctacccaaagcgcaatcccacaagatagaaatgataaattatcatgtgtttcataaacagtgacatcccaatcagggtgtgccgttaatgttgcttgtgttgcaaaggttcctgcgtgtgtacaaccaattactgctactttcatagtgttgcctcctaaataatataaaaacgatttcatcgtcagtttttgtgaaacatcacgcaatcagcgtgtaattatactgtacgctatttagttctaaattgtcaattttgacccgctatttatttgatttcacaaaccaaactggttatttatatgttatttaattgatacattgtgattttattctaaaaaaggacgttaatggttaaactcacccattaacgccctttctactattgaattaacgcatgaatcaaagtgaccttttgcgcttttggaccaattttaatattatcgtagagcaagtccttaatggcttcaatgtcttctcggttactataaatcgtcaatagactctcacctttttgaacggggtctccgatttttttgtgtaagactaatccgacagcataatcaatctcatcggttttcgcttgtcgaccaccaccaagtaacatgctggcaatccccatttcattagcggtcatttcagtcacataaccgttttctttagcaggtaattcgatttgatattgtgcttgtggcattaattttggattttcaataacggcaggatcaccaccttgataaataatcatttggcgaaaggcttcgagtgctcgaccatcgtcgatcacgccttgtagtaattgacgcgcttcatccaaggtacttgcctttccagccaagacaaccatttgactgcctaacgttaagattagttctgtaatatcggctggtccttctccttttaagatggcgattgattcttcgatttctagcgcattcccaatcgcattgcccaaaggttgattcatatcagaaataacggccatacattgcatccccacactacgcccaatgttaacgagggcttgtgccaattccttagcatcttcttcagtcttcataaaggctccggaaccagtcttaacgtccaatactaacgcatcggtgcctgaagcaatcttcttactcatgattgaccctgcaattaacggaatcgaatcaaccgtatcagtcacatctctgagtgcataaattttcttgtcagcgggggcaatattaccggttgccccaataatcgcaagtttaatctctgccacttgctttttaaaagcctcttctgttaatgaaatgttaaaatttggaatcgcttccaatttatccaatgtgccaccagtatggcctaaaccacgccctgaaatcatcggaattggaatccctaacgctgcaatcattggtgcaagtggaatactggtcttatcaccgacaccaccagttgaatgcttatcaactttgatgccatcaatcattgaaagatctaattggtcgcccgaacgcatcatcgtcatggtcaacaacgcccgttcgtcatcagtcatgtcattaaaataaatcgccattagtaacgcacttgcttggtagtctggaatcgtcccatctgtatacccatcaataaagaattggatttcttctgccgttagggcgccaccttgtcgcttatgatcaatgatatcaaccattctcatgctaatcactccttcttattagtcaggggcaatcaatgcttgggctgtatgcacatcgataattaaacaatttgcatagtgccccgctaatgcgcctttaatagccgcaattttttgttgcccgcctgctactaaaatactatgttccttcgtcttcaaatccgcgagttgaatcccaacggttcgctgatcaatcgctgcacacgtcacttgaccactcgtgttataaaaacgtgagcaaatatcgccaaccgctttttgttgcagcacagtttgttcttctttattaaaataacccgtttgaaagagtaaggcttcatctcgaaccgtgccaaccgtataaatcgcgatgttcgcttgcttgcccatttcaatcatccgtctaatatggcgatcttccatgacaacatcgtgcgtcgtttggttgccaaaaacaacgggtaacggcaagacatgcggcgctgtatggaaagccgccccaaatttcatcaggacttcttcggcataaaccggtgttggggtgtaagtgacactcccttttaattcaataatattaacgttttgagccgtttgttcttttagtgctagcgccacttggtttaacgtcttgccccaactgacaccgattaaatcattgtctttaacaatcgatgttagataatccgccgcatactgcccaagttggataattgtttgttggtaatcggaggcatccgtataaacaacgtgtacctcaggtaaatcatatttttgttgaattaatgcttctaatgcctgcgcactggcataaggatcaacgatttcaatccggacaatcccaatttctttagcatattgcaaaagtcgtgagacggttggtctagaaatcgctagttttttagcgatttcttcctggctcatattggctttgtaatataaattagcaacagctaaactttgttgcgtttttttatgcgactcaatttctaccatgatttgaacctctattcatcaaattcattacatcaaaaaagtattacaaatcaattctaatagaaaaagcatcgctaagccaactaaagtccaatttaattgtcgtgttttgtggctcgcccacttcacaattggataaaagacgaaaccaaatgctaaccctgttgaaattgaacctgttaatgggatcaaaacaatcattaaaaaggctggaaaccattctgtaaaatcttgcaaatcaattgcttggacctgcatcatcatcaaagcaccggtaataataatgactggtgcaatggctgcttggggcacaaagcgcaacaacggaataaagaaaagtgcgcctaaaaataatgtccccgccgtaaaggccgtgatgccagttcgaccaccactttcgatccccgaagcactttcagcagctgcgacggtgggactggtccctaagaaaccagagagtaaagtcgttaccgcacttgcttgaaatgcgcgtttaaattgttgctgatcggtcaataaaccttctaataagcccatcgattcaaaaactaagatcatggtcattgaaaaaaccgccagtccaaattttagcgtccataaagaactaaaatcaccttgcattaaaagttgcggatagtcacggatttgactaatcgtaatctgggttgttgcttgtgggacaagtttaaaaatccccgcgagcccactgattaagaaaatgccgacgataaaactccctggtgtttgtcttaaatacaatacgagcgtaacggtcaaccctaaaagggctaacagtggtgttgcttgactcaaatcacctaatgcgagcaacgactgtgtaccgcccgagcgaatcagttcggctttttcgagtcctaaaacaactaggaatagcccaataccaaccgtaatccccgcttttaacgatgctgggattaaagcggataaacgctcactaagagatgtaaaggcaatcccgacatagatcaaactactgaaaaaagaaatagccacggcttgttgccaagtcaaatgcatcccaaccactagggtatacgtgaaaaaggcattaacgcccattccaggtgtcaaaacaattggggccttagcccaaagtcccatgataaaacagccaattgctgatgaaaaaatcgtggcgaacacactaagattagccggaatccccgcatcctttaaaatcattggattaacaataatgatgtatgaaatcgcgaagaaacttgtgatgcctgctaaaatttctgttcgcacttgatttttacgtcccgcctggaatgccatttttctaaaaactccctttcaaattaccaaacgaataagccaacagtcgctgctgataataatgacactaaaataccagaaagcaacaagtaaccaacgtttttagcaattaaattattctttgatttatcgactaagcccttgaaagcgccgataatcatgccgactgttgagaagttggcaaacgaggtcatgaagaccgttaggattgccttgtaatgtggggcaaaatcgccaatcgtatttgtcactttacccatcacaacaaattcatttgtcactaacttagtccccataaattgcgcgaattcaaaagcatgactaacatctaagcccatcaaccaagcaaatgggaacatgataatccctaaaagatgttccaatgtaatccaagggttaatcaattgtaagattttatcaatcaaagcggctaatgccacaaaggcaataacgttggccgtaataatcaagactaacttaccagcgttcaagattgaatcccctaaaaatgaaaagaagggttctttcccttgtacgtctacttgttcgtcagaagtatcagacccactaccactcatcgttgcaatcgtatcttcttccggtgttacttcaactggattcaagatattagtaacaataattgcgttaataatattaattggaatcgcggttaaaataaattgccccggcatcatttgtgtataagccccaataatggatgccgtcacacagctcattgacatcatggctaacgttaagttccgttcgcctttcatctgtttgagttgtaatgctgaaacagccaaagcttcagtgtttcccaaaaacatcatttcaactgcgaaaaatgattcgaactttggttgacccgttacttttgataagccacgccctaaccatttaatgatccatggtaaaacaccgatatacgtcaaaatatcgaataacgggataatcattagaattggtaacaagacactcgtcacaaaatccatttgcttaacagctacccaacttggtaaagcaaaggcaatcccggtataagcgacttgaaccaaccaattaaagccattggccgcccccataacgatgttacgcccaatcggaaagccggttaaaaaccacgctagaaaaagattgattgccatcataatgccaattgaacgccatttaatctgcgacttttttttcgagaataaaaaggccaagccgacaaagacaattaaaccgataatattcactaaaagatacatttcgtcccctacttccctgttttaagcaataccagcttctaatgcaaccgttatcatttcgttgaacgatttttcgcgttcttcagctgaggtttcttctcctgtaatgatgtgattactaattgtcaacacggctaatgcctggacgttaaacttcgctgctaacatataaagtgccgcggcttccatttcagaacctaaaacaccatattggattaacttttgtcgatcaatttcatcgttgtaaaaacgatcctctgacaagatattaccaaccttaaccgcaattcgtgcttgttgggctgcttggtaagccttcattaagagtttaaaatcagccgtcggtgcataatacaatccggcaccaaatgtattttgaataatagcagaatctgtacttgcggattgggcgatcacaacgtctctgacgtgaacgtcagtccctaagccgccacaagtgccaacgcggatcaaccgtttaacaccataaaattgaattaattcattagcgtaaattgaaatggatggaatccccataccagaagcttgaactgaaatggcttggcctttgtagtaacccgtataaccaaatgcattccgaattgtattatagcggtgcacatctgttaaaaacgtttcagcaatatatttagcgcgcaatggatcaccaggcaataaaacagtttccgcaatatccccttgttgggcttcaatatgtgtactcatagaaataacgcctccattattttaattgtgttaaaaagcttgtaccaacttctcctgctggacaatcgaagttttctaaaatcgtcgcccctaaatcggcaaaagttgaacgaacaccaagtgattgattccctgctaaacgagatgaataagctaacaatgggacgtattcacgcgtatgatcagtccctctgaaaccaggatcgttgccatgatcagcagtgatgagtaacaagtcatcgggttttaaaacggctaataattcgcctaattgttgatcaaatgccattaaagcggccccgtacccttctggattacgacgatgaccatacatcgcatcaaaatcaactaagtttgtaaaactaaacccggtgaaatcggtttgtgcatttttgatggtttggaccatcccatcgtgattactttctgtatggacaccgcttgtaatccctttgccagaaaagatatcattaatcttacccactgcaaggacatccaagccagctgccttcaaacgatccatatcagtcgtcccggttggttctaatgtataatcatgccgatctgaggtccgttcaaaatggtctttgtcttgccccttaaacggacgtgcgatgacgcggccaattcggtatggcttttcaattgttatttgccgggcatattcgcaaattcgatataattcctcaagcggaatgaccgcttcattagcggcaatttgtaagacggaatcgcctgatgtataaacaattaaagcgcctgttgccagttgttcttcgccgtaatcccgaatcacatcagtgcctgaatagggccgattaacaattacggaacgaccactaaaagcagctagtttttgaattaattcgttgggaaagccattggggaaaaaaccaagtggttctttaactggtaaacccatcatttcccaatgaccatccatactatctttaccaactgaagtttcttgcatcttaccaaaataacccaaagctggttgcgccgcagggacacccttaattggatcagatgcgcgaatattacctaatcctaatttttgtaagttaggtaacttaaattgttcaccgtaaaacgcaccaatatgcccaagtgtgtcggcaccgacatcattaaagttagcagcatcactcgcttcaccaataccaactgaatctaagacaactgtaaaaacccgtttgaattgcatatttgttcgctccttttatttactgttcatgattttaacaccggcacttgcgcctaatcgatttgcaccagctgcaatcattgcttcagcatcttcttttgaatgaataccgccagatgccttaacccctaaccgatcgccaacgactgaacgcattaaagtaacatctgcaaccgttgcgccaccagtcgagaaaccagttgatgttttaacaaaatcagcacccgctttttcagataattcacaagcacgtcgtttttcctcatccgataatagacaagtttcaataataaccttcacgtgtttttgagcagcatggcctgctttgacaacggcttgaatatcacttagcacttgttcatcgtgacccgctttcaattcaccaacattgatgaccatgtctaattcatcagcgccattctcaatggcatcttgtgcttcaaaaactttagtagctgtcgttgttgcacccaaaggaaagccaataacagtcacaactttaacatcgctatcttgaagtgcctcactagcacgcttcacccaatatggatttaaacaaacagatgcaaattgatatgtttttgcttctgcgataatttggtctacttgagccattgttgcctcaggttttaataatgtatgatcgatatattttgctaagttcataattagcgcctccttgttttgttaacgctttcagtttaacaccgttttgaacatttgtaaacacctatcttgaaattatgtaaaattcacaattaaaaagaagcgataccagaattatctttggcatcgcttctttttaatgtgtcatagtgctattaattagacgtattgtaaaacttgcttgtcagcatcatcggtagcgactttgtaagccacgtcgattgtgccgccacctaaacattctgcgccgtcgtagaaaacaacagcttgtccgggtgtaatagcgcgcactggcgcatcgaagacaactgtagcagttgtctctgaagtcatgtgaactgttacgccaacatcttgttgacgataacggaacttcgctgtgcaatggaaatctgtgccgtgatcaactggtgtgatccaagtcatcttacttgcatccaattggtcagcatagagtaactcgttatggtagccttggccaacatacagaatattctgctctaagtctttgccgacaacaaaccatgggtcgtttgattcgccaccgccaccgataccaagaccagaacgttgaccgattgtgtagtacatcaaaccatcatgtgtgcctttttcaagaccgttgacagtcatcatcttacctggttgtgctggtaagtattcgcctaagaattgcttaaagttccgttcgccgatgaaacaaatcccagttgagtccttcttcttagcagttgctaagccagcttcttcagctaaacgacggacttctgatttttgcatgtgaccgattgggaacattgatttttgtaattgatcttgagaaagcgcactcaagaagtatgtttgatctttattgctatcaccgccacgcaacatgtgggcaatgccgttttcatcgcgttcgatctgagcatagtggcccattgcgataaagtcagcatcaagttccattgcgtaatctaagaaagccttgaatttcacttctttgttacacataacatcaggattaggtgttctaccgtgcttatattcgtctaagaaatattcgaacacgcgatcccagtattccttttcgaagttaacggaataataaggaatgccaattttagaagcaaccttggcaacatcctcataatcttccgttgcggtacagacaccattttcatccgtatcgtcccaatttttcatgaaaacaccaataacatcataaccttgttgctttaacaataaggctgttactgatgagtccactccgccgctcataccaacgacgactcgtgtattactgtggtcaaccacaatatcaccatcatttcaaatagattctagttttctacgatttgaaggtcgtgaattccagtactaccattatagcaatcctcgctcatatttcaaaccaaaacactcacttttcataagtaattgtcaataaaaaaggaacgctaaccaattttgaccattggcagcgttcccatcctcatttgattatgcttgggctaccaaaatatcccgttcaatcaagtgattaataatgaaattaaattgttcaacgttttcagcgttcttttcatccttaaaaatattaactggatgtaacccatcagcggaagtgaccgacattttgagcgtcttcaattctttaccaacagtaattttaagcttaatcgctgtattaaagggtgaattaggatcaagaggccgttccaattggaaattaccattattggttggcatgaaaccagtatcccgtaatgtatatttcttaacggcgtcacttaacccatattgtgtcgtattgcctaaaaccgttgctgtctcttttaataaagccatcttgctacctccatcaactgattgatagtttcattttagcatagatgaagcggttgcgcctaggctttaccggcttgcttagccaagttttttttcacaattttagttaatgcggcacaaaaggcagtcacatctgcttcagttgtctcaacaccaaaactaattcgaatactttcggcaactcgtgggctatcttcaccgtacatggcaattagaacgtgtgaaggttccaaatcacctgcagtacatgctgacccacctgaaatcgcaaagcctgctaaatcaaggttcatctgcaagacataggttgagacacccttaacccacatatttaatacgtggcccaccatatcgtcactacctgcgccattgacttcaaagtcaataccgtttgcttgaagggtttctaagacttgttgtttgaaaccagcataccgagcgcgatgttcagccttaacagctggtgtcaacaattcaaccgctttggcaaacccagcaacggctggaatattttctgtccccgcacggcgtttcttttcttgttcgccacccattaaaaatgatggcaaatgaatcgcgtcattcacgtacaagaacccaatttgcttaggcccattaatcttgtgtgctgaaacagataacatatcaatctgatcttcttgcacatcgatatccaataacccataagcctgagtggcatccgtatggaaccaagcatttgattcgtgaacaagttgaccgatttcatgaattggcatatgactaccaatttcattattgcccatcataatcgttactagaatcgtttcaggtgttaaggcagcctttaagtcagccaattcaataacgccttgtgcattaacgggtaaataaacgacatcaaacccttggctttctaaataagccattggttttaaaacagaatgatgttcaatcgctgtcgtaataatccgtttaccttcgttagcccgtttttgagccgtttgtaaaatcgccatgttattactttcagttgcaccactggttaaaataatatcgttatccttcgcattaatactttgcgctagaatatgccgacttgtatctaaaacagtatgtgcttggcgcccaaagaaatgggtgctagacgcattcccaaaatcttgggtcatctgcgtggtcatcgtctcgattacctccggggcaatcggggtcgttgctgcgttgtctaaataaatatgttccaaaatttttcgcctcgttttaaaaagtatctatgttagtttaacatagaagccactttattagcggtagaaacacttcaaaactaaaaaaagactagggttagcccctaatcttttaataatgcttcaattatgcggtcatcaaggctgctttttgttgttctgatagtgattcattcatccgaccactcttgaaaccagctaaatcaacagtgacaaattcgaacccagcttgttgtaaggcttggttgatttgttcgctgtgtgttaaaaagtcagcaatttgtgcttctggcacttcaacacgggcaattgattcgtggtagcgaacacggaccgttgcaaaacctaaatcacgcaagaatttttctgattgcatgacttgcgcaatcttgtcttctgttaaggctgtgttatatggaaagcgtgaagaaactgaacagctggccactttgttccagttattcaagtttaattctttcgctaattgacggacatcaatcttgtagaaaccagctgtttgaaggacactttctgcaccagcttcatcacgagctcgtaagccgggacggaaatcactattgtcatccataatcatgccatccaagacgtgatcaaagcctttttcagcagcgatttggtttaattgtgtgtagaacatcttcttgctgtaataccaagtttctggtgtgttattagcaatatgttcatctgataagtagtttaaagtggttgcttcaacgttagctcccatttcatgtgctaagtcgattgccttgttaaattcttcgtctgtgaataattctgagttagcaacgactgctaagacattttccttaccgagtgtttctaaagccatttttaacactaatgtgctatcaatcccaccagaaaaggctacgattacttttttcatttgttgtagacttgcagccaacattgcttttttttcagataatgtattcattgttaaagacttctttctatataattaaattaattgttttaattctgataaaccattttgaatctgatcagcatacgctaaatcattgttatctaaacttttgacaatcattaaattcaaatctgtggcactatcaacaaagtctttgaatgttgattgaccagcactttgttgtgcatcgtctaaatccccgtatagttgttccgctgttaaaagagcttgttgtgcttcaataagactcgttgaaattgtccctggttgtgacgcatgtgcagcgacttcaaataagttgaccatcatcgtttgagtttgtttaatttgttcccgcataattgattcctccgattaaattagataccaaagaagctccgcatgaagagtgcggcacataagccaccaacaaatggggcaatcccaggtacaataatcccgtattgccaatctgagttagctttatttttaataggtaaaatagcgtgcgcaattctaggacccatatcacgtgcaaggttcatcgcgaatccggtaggaccgcccatccccatcccaattgcccaaacaagtaacccaacagcaattggtgcaatccctggtgtcttgatttgtgtaatcgcgataattgatgaaatgaaaacaaatgttgcgaaaaattcaacgaagaagttccgaggtaaattgcggataccaggggctgttgagaagatgttccgaacagcgactggatcgacattgccttctgaagctttgaattcgtcggcgtacataatgtagacaatgatagcaccgacaaccccacccaagacttcagcaactgaataaggaatgaacattgcccatgagatattgcctaaaacgcattgtgctagtaccatcgctgggttaattgagacatccccaaagatgaataaggctactgtaatcccgaagccccaagttgtaatcgcaaataaatgacctgagccacgatattttgagcctttgaggacttcatcactatgaaccccgaccccgaaaatgatcatgagcgctgtgcccatgaattctgctaataactgatgaaccatgaataaattcctccaaataatgactattttaaaacgtgcttttgccaatagcttgctgtgcttttattttaattgctgataaacagcgagataaacttgattaagcgccacgtcataggccttagcggctgctaaacagtcgtcaaactccggcgtatatttttcaatatcgtcgtaattaactactttgacccgaatatcaccataactcgttgtgacggtcataaaatgacgtggcatgatggtgcgccccatagtctggtaacgcacgccaacggttgatgtgtgtttcaaaatcagataagtaatggcttgctgatcggctggatgaatcatgaccgttagtttgatagctggccgatttttcttcatttgaataggactgaaaaaggcatcgagcgccccattatccatcaataaatccaaaaccggcgctaaactttccgctgactgatcatcaatgttggcctccaacactaatatctgatctgccttttcttcaacaacttgttggcttagttttttttttcgcacaacatcacacgtaatgcgttgagttgtggtgtttcccgattaccaaagccataaccaactttagtaatcgtttggttgtctggaattggacagaattgatcgacaaccgtcttaacaatccccattcccgttggtgtaatcaattccgtatgaatctctgggttttgcttaatcggaatcgcactgcccactcgcatttgcatcacagctggtaccggaacaggcatcattccatgggccactttgataaagccactgccatccgttaattcggatgaataaacttggtcgactgccaataattcgagtgcgataaacgcgccgacaatatcaacgattgaatcgagcgcaccgacttcatgaaaatgaacatcacttagcggcaattcgtgaacaaccgcttctgatttggcaatttccgtaaaaacttgtttagcattggttttaacataatcgcttaaatcactgtgatcaatgatggcttcaatgtcctttaaatgccgaacttcatcaccatggctatgtgtatgcccatctgcatgttggtgtggatgatcatgatgatgagttgatgtggtttcaataaagccttcatccttgtgcacggtttctggcaaatgaacatcaaaatcggtcccatagatactgcttttagcgatccgctgggcatgcaagtggtaaccagtcacatttaacttggccaattcggtctcaaattgcttgaaatcaacccctaaatcgagtaatgcgccaataaacatgtcaccactaatccctgaaaaagcgtctaaataaagtgttctcatttgtcatcctccgtctcacttaaatgattgatcatacttgctgagtaaccggcgccaaaaccattatcgacattgacgaccgtaatgcctgaagcacaactattgagcatcgtcatcagcgctgttagtccaccaaagttcgtcccataaccgatgctagtggggacggcaatcagtggtttttcaatcaacccaccaacaacactggctaaggcgccttccatgccagcgaccacaatcacgacctgggcctcacgaatctcatctaaatgttcaaaaagacgatgaatgccagcaaccccgacatcataaattcgtttcacttggttaccgtaaacctctgcggtaacggctgcttcttcggcaaccgccatgtctgaagtaccagccgtcacaacggcaatataatgcttagtttgttctaccggctttaacattaaagtgacgcactgggctaattcatcataatgggcggttggttcggcaactctaattaccgcatacttttggggagatactctcgtacagagaatattttcagcatgccgttttaaagaaccgataatgccaataatttggtcggctgtcttaccggcaccatagattacttccggatagccattacgtttttggcgacttaaatcgaccttggcaaagcctaaatcatcgatggtctgttcatgcgctagctgcttggtggcctcttttacactgactttttggtttgcaacggcttctaatagctgttgtagctcatttgttgtgtccaaactactcattctttctattgttatttcacaataacccctaaaccatcagggattacagtcacttttgcgtccgcaccttcaattgcataggctcgttctaaggcagcatctaaactagttgccagttccatatgcatatcggtaattaattgaggatcaactaaatctgatacgaaaatcacgtgatgttgcactaaaattcgggctaaaatttgtgacgtccattgatcgggcaccgtttcaagccgtggtgtgttaattgcttggtctaagaattcctttggatctttaacgtcggcaatattatggtagaaaccatcgccaccatgaccatcacgtgcaccagcgaccataataattacgccaccttgtttgtttgtggcttcagcagcagtcatccctttaaccgcttggtagatattttgatcaagtggataaccaccattggttgagatcgcgatatcacaatcaattttgtcgacttctgatagactttcaacgaagtcacagccttttttgtgtgccgtttctaaattaccggcaaaagaaccgatgatatgtttatcttcatccaaaacaacgttcaagataaatttaagaccggctgttttagcggcgtaaaccatatccttgtggactggattatgcattaagttcccagttcttgaataatgggaattgataaattcacctgagtggttggccataattgttttgtatgacgccacacccggtagaattgatttccgaccgcctgaaaaaccggcgaagaaatgagattcaatgaaaccttctgaaattaacaagtcagcttcaacagcaattttattgataatgcaatcaccgcctgaaggtaattggccaattttaaccactgaactatcatcagttgagatgtgcatgacgatttcttcattagcaacgatttcttcaccatacttattaacaagttcttcgtgcgttgaaggtcggtgaaacccggttgccaccaaaatgcggatgcgtgcatcaggtgccactgaacgaatccgtcttaataaaataggggtcataatgtgcgaaggtactggtcgggtgtgatcagaactaatgatgacaatgttcttctttcccttcgccaattcttccaacttcggactatcaatgggattatccaatgactgctcaactgtttcggcctcactcaatggattttgataagtggctgcttgagaaaccagcttgccggcaaaattagcatctgcaatattagccgtaataattttttgatcgtaaggtaattttatagctaccaaactgtaggacttcctttctcggttctaaattaacgcttaaaaaagctacgctcatagttatacagattttctgaaaaggatgcggtataatttatagacaacattaaacgttacaaaaggaaggctacaaatgttaacaaatgttcaattaaaatagcgtacacttaagacttaagttatcgaataataagtataaatgattattaatctcaattaaggtaggctatcgcattatggttttaaatgatattgaatttctaattaattttttagaggatcgacaagtcccaattatcaccaaaaaacgacatacttatctgacctatcatggtctagaggaacgttatacctatatattgaaaaacggcattatcaaaaattcgattatcttacaagatggccgtgaatttaacttatcttatatcgcacaacccgacgttatttcgctccttcgcgatgaggtctctaaatacaccgaccaaccctttaacgtccggattgaatcagaagaagcaaccttctatcaaatcgatcgggtcaccttctggcactacgttaacaccacccctgaattgcaaaactacattaaaaattactatcgtaaaaaattatctgaaaatatttatcgtctgcaaaaaatgatgatgaatggtaaaaaaggcgggctttgtgccttcttatacaacctaatcgacctatttggaatcaaacaaaaagacggtattctgattgattttgtagtcactaacgaagatatcgctggtttttgtggcattagttccagaagtagtgttaatagaatgctcaatcagcttaaaaaagatggtgtcttgcaaactaacggccacaaatttttaattaaggatgtcagttatctattggacaacattgccaactagccgtttgttaccatttgtatacatgaaatggcattgaaaacccctatgagacgcgtaacatgaacagcatcaattgactcatatggaggtttcatcacatgcatattccagataattatttaagtccacaaacctgtacttttttcttcgctgccactataccaatcgttggcttggcactaaagaaggttaagctacaagttgccgaaaaaaaagaaacggtgccgatgctaggcatctccgcttctctgtcgtttttaatgatgatgtttaacgtgccgattcctggtgggacaaccgcccatgccgttggtgctactttactcgccatcctgattggcccgtatgccgccagtttatcggttacacttgctttagtgacacaagccttcttgtttggcgatggtgggatcctcgcgctaggtgctaatgtcttcaatatggctgttgttatgccttttgtcggttatggtatttatcgactttttcaaaaatggcatcacgaaaagttgggtgttatccttggtgcttatctaggcatcaacgcggcggctttaatggcgggcattgaacttggcttacaacccttaatcgcccatgacgcagctggtcaaccactttatgccccttatccgctacacattgcgattccagcaatgttattcgcccacctattaatcgctggttgggttgaagctggtttcacggttgcggtctatcaattcatcaaaaaagttgcccctaacgaactttacgctgcccctcaaaaactcaccgcagtaacaccaactaaaaaactacaccgtgccctttatacttttatcgttggtttgattattttgtcaccgattggtttattagcaagtggcactgcttggggtgaatgggacgcaagtgaactcttgcaacaattaaaaacagcccatcttagccaagtcctcccgaccggtatggcccatggcttaaactttaatgccctctttagcgattacgcgattcaagggcttcccctaccacttggttacatgctatccgcactgacagcggtccttatcttctatctcattggaaaactggtgattaatcattatgcaacccacgcctaaactgcctgattggctcaacaaaacagaaataattccccaaacggtcgctaaacccgaccgttttttaattcaaaatttacggttactgacggctattttgtcacgactcgcccaaccaaccatccgacatcaatcaactcggcaaacacctggtattcaattgcttagtttactcattaccattttaatcgtcgtactcacacatagctttttactcatttggctaatcggattattaacacttatccgtatttgtgtcttaccaggtcagcaaattggaccacttttaaagcgagtcgctagcattagtttagtcgcccttgcgttaattttaccgaatttctggctcggtcacgctgaaacgacttggtattttattattcgtaccgagattattttattcaatattggcttttttttacagttaatcacctggcctgcgtttattttagccttacgccaacttaaactacccggactgctagttttaactttagaaattagtcttaaatacagccatttattagcacaatttttacaagaatcactttgggcaatacgcttgcgttcaaccggtaaagcgcaaaaaagacagcacttagtcggttccttgattggtcgactctatctaagcgcacgagcttatatgactgaattatatcaagcgatgcttttacggggttatactggtcatgttaatcaacaagcatcattaaccattacacgctacgattggcgcttaatcagttgggatctcaccttgatttgtctattctgtttcattcggaggtaaataatatgctacaactcaatcacattcactatgcctacacccaaacagatagtttaacggatatttcgctcactattcagcctggtgaagcagtcgcgtttatggggcccaacggttctggtaaatcaaccttattcaaattaatcaatggcttaatcgaaccaacggccggccaatattactttaaggaccagttagttgatcatcaatttttaaaaaatgcggctcaaacgaccgccttacatcgtgcggtcggctttgtttttcaaaacagtgatgtgcaactcttcaacgaaacggttttcgccgaactcgcctttggtcctgaacagatgggtctgtctaaagaagccgttcaaacccgtgtgcaagactgcttaaaactccttcaaatcgaaaaactcgccgatcgagtcccctatcaactatccggtggtgaaaagaaattagtcgcattagggagcatcttaacaatgaatcccgaaatgattattttggatgaaccctttaatggcttatcggcagcttatcagacactattagttcaactactacaacagctgaaccaggctggcaaaagcattttgcttgccagtcataactacgaacaggtgcaacaaatcgctaagcgaattgttatttttaacgaaggccatcaaattaccaatgatttaccgctaacggaaattcaacggcaaccagccctaatggcagctttaagacagttataataatttaaaaatataaatctaaaaacgtatcttctgatgaaggtgcgtttttttattaaaaaaggctggcacaaaaataaatttgtgtcagcctcaaaagtcattattcatttcgattcataaattttttaaaacttctaaaatctaaaaaagcaaccaaacaggataaaataatcgccatcggaataaagacgaagaattcgttgctaacgagcgtcgctattaaagctaaaaatagccctaaaaggattaaataccgataatagcctagtttaagataaacataatctcgataacgctccggtaaaaatatcatcaatgttattatgaataacacgccatacaaatccatctaactaccgccttttttatctatcattttcaatctgtacccatttctccgtcgcatccaccgtaattgtctgaccaattggtaatgtcagaatcggttgcgtatgcccaacattgacattatagagtactggtatcgtttttaaaattggaaatttcgctaaaatatataagagcatttcttcatccaaatcaacatccgtcgggattcgcccgataatcagcgcctgtggctgtcgaatactttgtaagagtgccgctagattacgtgaaaaatcgtaacgatcagaatcatctgaacactcgatcaataaaattttacgatcataatttggttgataagacgttccttgtaaggtgtagagcgtgttcaagttgccccccactaactcacccgttacgcggcctttggcatatgtctgccattgattgtcgtgatagtcgcgcttagcatccggcaagtaccatgcatcacttgaccattgggcagatgcagtcaaccgaaccgaatccgtgccctgagtcatcaacttttgccaattttgaacttgataatccccgagttgatccgctaatttaaatgcgatataagatgggccgtagtaggtcactaatccggtcttagcggtaatcgcattgcccaacgatgtaaaatcagagtagccacaaataatcttagggtgcttagcaatcatctcaaaatcgaggtacggcaataattcgttggcattataaccaccagtcaccgctaaaattgctttaacgttatcatctaaaaaagcggcatgtaaatcagcaacacgcgcctcaattggacttgaattaagacagtccattaccgtcacattttgaccaaatgttacctgataaccaaggtcgtttaggcgtttgtgcgccgcttgattggcggtaaacccgcccacactttgtaaactattgctaggtgcgatgacccgaatttcatcgccgtttgataaacgcttgggaatcatctaaattcactcctttttaacaggcaattttaattagtttaactgaattagttagtttaagccacaatatcgccacttatttttaactaaaaaaagaaccctagctatttttctaattggccagggttcttatttaactaactttctgaattgttatcattatcctggtgatcggcaatcaggcagccatccggcccacagataccggattcagaatcattgccggtaatttcaatcgtttcaaactgattatcattcattatgcttgctcctctgactgaatttgcttaagtgcttttacaaaggcctcataaggttgcgccccactgatggcgtacttattattaattacaaaataaggggcggcatgaatgcctaaccgctgcgcttcattttcatcatccagtacagcctggtgatagtcatccgaatttaaaacctggctcacttcatttttatccagtcccacttcagtagcagtcgctagtaaaatagcatgatccgcgattgattgtccatcattaaagtaaacttgatagaaacgtttgatgaccttttcagtcagtaccggattttctttactttccgccaacttaattaatcgatgggcatcaaccgtatttgttgggacaacccgattaattgccattggtaactcatcatccttagccatttgatcttttgcttgtgcttccagggctcgattaccttgcgtaaagtggttaatgtaccctttggttgtctctttaggaatcgttggatctaactcaaaagatttaaattctaattgtgtatcatcatagattccaatttctttcattgcccgcttcatccgattcgaaccgatataacaaaaaggacacgcaatatctgaccaatacttaatttccatttcaataaccatcctctattgtttaatcgttgcctcataatttaactgttcaatatattcaaaagcattttgccctgcaattccaccatccccaactgctgttgtaatttggcgtaattttttctggcggacatctccaacggcgtaaatcccaggaattgacgttgccatttcggtatctgtcataacccagctagcttcatctgtaatattgagctttttaaacatttgactgttagggacattcccaacataaatgaaaacaccggaagtattgattactttttcttccccagtttcattgtcgagcatcttaacccccgtcacatgttgatcatcacccataatttcagtgacgcccgcatgccacgtaaaagccatcttatcatttgcaaaggcgcggttttgaagcaccttttgggcgcgtaattcatcacggcgatgaaccacgttaacattcttggtaatattggctaaatatagaccttccgaaatagcggaatcaccaccaccaactaccgtcacatctttatttttaaagaaagccccatcacaaactgcacaatacgagatccctttgccggagtatttttcttcccctaaaacccccaacttgcggttcgttgatcctgttgcaataatcactactttagttgtgaaatcatcaccatcagtacgaatatgcttagtctggtgctcatcaattgtcacctcttgaacatcgccataaacaaattcgacccctgcattagtagccgtttcatacattctttctcccaattcagggcctttaatcgactgataacccggatagttttcaatatcatctgtattattcatttgaccaccataaacaccgcgatcaagcattgctactttcaaattagcccgtgcagcatacatcgccgcagtcatgcccccaggtccagcgccaattacaataacgtcataatccatcatttgtctgtacctccattagtagtaatattatttaaaaattgttcaacttctactttcgttttacgttctttattaactaatcggctgatttcataaccatcttgataagcgatgaagcttgggatgccaaaaatatttaactcttgtgccaaatcaatattttcatcgcgatcaacctcaataaactgataatctggaaagtcagattcaatttctggtaagtgcgacttaataaaatggcagtcgggacaccaatctgccataaaaactaatacatatttaccctgttttaattttgtatctagcgcttttttactcataaccggtaatttttccatcagtgttcctccacattattttgaaatcgaaatttattcaacgatttcattgaatagatgaatattaccacgtattttatttctgtcaatttttaaactctaaaaaaatacggctatctttaaaaagacagccgtatacttatactaattaattttaacgaagctattgcacgacaactcaaactttcacaacaataaatcgctcgccaataatcaagtgttcgatcaccctcgccttctaaataggcatgatcagctgataccttattataagcaataattttacagctcattgttttagtaatcgcagcgggtttcccttgtccatctaatataatattataagcaccagcctgaggtacatgctcattaggttaatacaagtcaatggtcgaagtagttgccgttttttgaccactaatgactagtaccgctaattcattagccatttgcactgtatttccaaatgaataaatctctgctggttgccgttcaggtgataaattttgttctttaataaacgtttgccaatattgctcaacctctgatgtcattggtaaccctccgcatccagttattagattggcgtttgtttaccagaaattaccattttgtcaaaaaaaataagcctagcatcaaagctagactcacttggtcacttattgccaccgtcccatttttttgagcatcatcggatagcttttaattaagaaccatttttttaattgaccggttgtttgatcagcacgaagacccacgatacctttagctaacatctgttcaaaagtaattgtcggttctgtccattgaccatcaatgtaacaaagttggcaatactgcgttgccttggtgccatcttgttcacgaccttggttggctggtgaaagtggcatgccacaactttgacaaaatttttccatagaaactcctgattaatgtgcttttcaacccatattcattcgccttgttaggctagtgctcggaatatcccgggtttgaacgcacttcttttttaacgtgctttttgaaactcccccttgcgcttaacaacatttgtcaaatcagcgattacatcgctaatccgccaaattaagttaatgctcagagtcaccccgtttcaaacgcacttctttctttaacgtgcttctcaagctaactttctgcgcttagccctgtgaatcaaataagcgaccttgtcgcttattcgcttccctgtgctaatactcaaaagctaaccggcttgaaaagcacccattcttatttaatattcttcaagaagttgaggagcattgctgctgatttttggcctgcttctacgatgaattcgtcaaacgttacaccagcatcctcatcaccaacgtcactcatagcacggataacaacgaatggaatcccaaattgggttgccacttggccaatcgctgcgccttccatttcacaagagagggcttctggatagatttccttaatcgctttgattttatcttggctggcgataaattggtcacccgtgacgattaaaccaacacgtggttgtaagtcaactgctttggcagccgcttcaatttgtttgactgtgttagcatccccttcaaaacgttggggttgttgtggtaattgtcctggtaaataaccaaaggccgttgcttcagcatcatggtatgcgacttgacttgaaatcacaacgtcaccgatgtgtaagccttcgccaatcccaccagctgaacctgtattgataacaacatctggtttttcttcggctaataaaatcgccgttgtcatcccagcttgtactttaccaatccctgattcaaccaacgttacttcatgaccgtacaattgtcctttatagaaggtattgcctgccaccgtatgttcttgaacatcttctaacttcgttaacaatgtccgaatttcttcttccatggcacaaacgacactaattttcatattaatattctccgtttcctaaaaataatcgactttactagtttatatgaaaaataagatcaagtaaacgattataattaatccaaatgtaatcccaatcgcccagttcaaacgagtcttcaatcgtttaactgttgggagatcttcttttttctcacgccgacgcttcttttccggagcgtcatcggtcacagccttgaaagccgccttttgcttttgtcgggcatattcccgttcggttcttaaccgttcttgatcgcgttgtttaaaagccgcttcttccgcctctttttgttggcggtaagcttcacgcgtactcggttcattagccattgtcagccctcctatttgctttgtaattgccagtagtatagtgccataatcgttttggcatcacaaatgagcccactcttaacggctgctttcgcttgtgcgagtgttaagtgttcaacattcaaaaactcatcatcatctaacggacgtttattagcaaccggtgttagagccgtcgtataaaagagcgtcattttttcattagaaaagcctggcgatgtaaagaattcagtaatctgttgcaaattagtcgtcgttaagcctgtttcttcatttaattctcgtaaagcaactttggccaaatccgtttcacctaaatcaattttccccgctggaatttcaaacgtttcacgttgcattggtgcgcgccattgtcgtaccaataatagctcaccatcagctgtgattggaataatcccaaccgcaccatgatgatagacaatttcgcgactggcagtttgaccatctggcaaggcaactagttgaaccgctaaatcaatcacatgccctttaaaaagtgtttcttcagataataccttttcctcataagacatttaaaattagccacctttaattaagtttgcattcttgtcaatcattatacgcgcttttgaaatcgtccgctatcagtacgtaaaagttcattatttggttgggattaaatatccatccttaggctgatacctttttaatgaaattactgttaaaatgaactcatcaatataaatttaggagctgacaataatgtttaaaaaaataaaaatatggtgtattggctttctaatcgtccctctttcatgtctcatattgggcttactatttcattaccaaggtgattggattgattttctttatgtcggtatcggcttattattagcgctgatttatatgaaaatcaactttaatcacctcaaacgtcaaccccaatacaaaaccaatcacaaaatttcagataaaatgctgaagcactatcaagatgccggcatgagtgatgatgagattgatttcttcagagaaacactgcaccaagccgaaattgaagttcaagctttggcaaccaacatgcaagctcttcctaaattaaaggcaatcgatttaaatcaagaaacaacgcgtgtcagtcaagccatgttccaggcaatcgtcaaggaacccaaacgcttgcacttagccagcgattttctctatcgtcacttaccttcaattaatgagctaacgcgcaaattcatcgagattagtcatcatgaagttaagacggctgatacttacgctgttttggataaatctgccgaagcaatcgatgctttgagccaacaaattaagcaagattacgcgacttttgtggccgatgatttagacgatctcgacactgaaatctcagttgcaaaacaacaaacaacccctgatcacaaggaggaaaactaatgacagacgttaccgaaaaacaagatgatttaatgagtgatttattaaaagacccatttgatcaagcagcctctgccgttactgaagaaacggttgaaaaaaaatcaggtgaagaattactaaaccaactctcacctgaacaacaacaacaagcccaacaattggctgaacaattagacgttaacgatcaacaggcggttctcaactacggcgcccaggcccaaaagaaactaggtgctttttcgcaaacaatgttgaatcaagtccaaagccaagaaactggtgaaatcggcgacgcactgacctcattgatgtatcgtctaaacgaagctaacccagacgaattacgggccgaagacagcaacgttttcaagcggatgtttggtaagattaaaaaatcagtttacgaagtcactgctaagtatcaaaagattggtgctcaaatcgacggaattgcgatcaaactggaaaaagaaaaagacggtttaatgcgcgataacgaaacattggaaggtctatacgctaaaaacaaagcctactttgatgcacttaatatctacatcgccgctggtcaactcaagatgcaagcactcgatcaaactgaaatcccagctgccatggcgaaagccgaaaatgacaacaatcaaatggctgtgcaagaggtcaatgatctcaatcaatttaaaaaccggcttgaaaagcggacttatgatttagagttagcccgtcaaattacgctccaacaagcgccacaaattcgcttaatccaaaatacgaaccaagcgctcgctgagaagattcaagcctcaattaacaccgcaattccgctttggaagaatcaagtcgcaatcgccttgaccctcctccgtcaaaaagatgcggtcactgcacaacgccaagtttccgaaacaactaacgatcttttgaagaaaaatagtgcgatgttgaagatgtcatcgattgaaactgctaaagaaaacgaacgtggcgtcgttgatatcgaaacccttcaaaagacccaaaacgacttagtcgaaacccttcaagaaaccttgaagattcaacaagaaggtcacgaaaaacggcaaatggctgaaaaagaattaaaccacatggaaaatgacttacgtgatcatttattagcctacacacaaggccaaacaacgaataacccgggtcctaagaatgtaaactaaaaaagattcaaaaaaataatcggtcccgttgaaacagcttcttaattatatcatgtaatcaatcatctgtcaaacacttttaaaaattatttattacttagaagttatagctccgtaagcaacatataatatgttatcacgattagaattaaataacaagtgtttttcaaaaacattttaattatttatttccttactcattactgagctgctcgcttttgacaacttttatatcttatcaacttaatacggctaggtcaagcacttattactaaaaaattgattaaatgattaatttattcctataagcattaaatccaactaataccttctatataaaattctactaagtgggacacaaaaagggcgttagaacaacttatcgttgttctaacgcccttcattacaccttattgtgctttagattgcaagtattcagtatagtagcttgccagtaagtcagaaatccgaccgccgactgtttcatagtccttatctggacggttagcaagtgagattcttaaataccccgccttggttcccatcccagcaccatccattacaacaaccccatattccgctgcgagtcgccattcaaatgctaaatgattacagttttgttccaagtaagctctgaaatctttagagtatttcgactctgctaacttatagatactaaaaacagtgtagtattccgcattttcttcggttgtcttaacgactaacccaagcgattcccaaaaggccttatatcgatgacttacaatttccttagatgctgtcacatacggatcttctctgccttcgtaaatcaggttcgtcaaactaaaaagcgccattgtgatctgttgtggtgttgataagccagctgcatggtataacccgatgtttcgactatccgctaccgttcgatcgataaaactcatttcgtgcggtttatttgtaacgtacgaatatcgttttcggaaagcttctctaataacaggatcttctgctgtcatttcttcaatcaacttatcgaaaatattatcgtcatgcatcgcgattaaaccaatccgttgaccagttgccccatataatttagagaatgagtacactaacaatgtattatgtggcacaactgaatagatagtcttaaaatcatcgacaaacgtgccataaacatcatccgtaataatcacgaggttcggattggcttcaacgacttctttcaacttatctagtgcatggtcactaaaagctctagaagttgggttggttgggttcaccacgaaaaaggctttaacatttggatccttcaactcttcaaatttatgatcgaccaattgccagtcatcagattcatcagaactaacgttaaactcttgtagtttaaattcatttagttctggaatctgcaagtacggtgtaaagattggcgtattaatcgcaatcgtatcacccgcctctaaaatatggctgacctttagctcattaaagagatagaccatcgcagctgtcccaccttcagttggaaagaccttcgtcttatctgatagatgttcaccgcgatagagattcacttctagataccggtttaaaatcttttcaacattcactaaactgcgtgatggttctggataatggttgccaataacgccatcgacccattcaaagaccagctcatcttggttgatatgcatgacgtctcgggtgtaagccaaggcctgcttcaaaaaagcatccaccggattatcaccatctaagaactgattgaagcgttccgcgatacctgtttgatcggtgtagccagcaagattaccatcgtctaagttaattgtttgtaaggattctttcatcccaaattcaacaatccgattaaaggcaaatcttgcttgtgtattaatccaattcggattgccgcgcccgacattaatcgcccgtaaaccacgactgtttgtcagtgcatatttataaaagagcgctgcgacttcaaagttcgacatctgggttaattttgttacatcaattttatccatatgacctccgccaatattagttaagttagtcatttatccccataagcttaacacttgtctgttatagatacagtatatattaaaaataaatcatcaagatttaatcaaggactcaacgtccagcactttatcgatccaatcgccttgataaaagtcctcttcatgggtcactagcaagacgccgccctcaaattcttggatggctttgcgcaatgcgttcttcgtatcatcgtctaaatggttcgttggttcatctaatagaaggaagttacttgaggttaagagcaattcggcgattttaacctttgattgctcgccaccgctgagttgtttcaacggcttcatcgcctcttcagcagttagtcctgtccgggataatacttggcgaagttccttttgcttttgctctggatattcaccttgtaaatattggagtggggttgccatgttgttaggccacttcaagtcctgcttgaagtaaccaaacttgaccgtgctggcaatttcaaagtcaccgctaatcgctggaatttctttaatgatagttttaatcagcgttgacttaccaatcccattaaaccctttgaggaccactttttgatcccgaccaattgagaagtttaaggctggcaatagcgcattttcgtaaccaatctctagatcattggtcgtcaatagaatctgactggctgttgcgtggtatggaaaacggaagttagccttcacgcgattacttgggggcgtcaaaatatccatatgggctaattgcttttcacgactcttggcaattgttgaccgtgaaccagctttatacttacggatataagcctttgtcttttcaattttcttttgttgattctcataagccttcatatagctagcttggttatcggctttttggcggaaggcctgttggagcgttccggtatatttggtaatcttcccaaattcgatatcggcaatacaggttgttacccgttctaagaaatcataatcatgggaaattgtaatgaaggccccttcgaagttattcaaataatcactgagccaatcgatatgattggtatccaaataattggttggttcatccaataacaacatatccggttcttctaatagtaacttcgctaaaataatcttcgaccgctggcccccactaagttgtgaaacgtcatggtccatccccagcgcatcaatccccaaaccagttgcaacttgcataacccgcgtatcaatttcatagaagttcttggcttctagtaactcttgaatcgcacccgctttttcgagtagttggtcatctaaactcgttgcgtagtcggcgtagtattgactcatccgttcttcctgagcatacaaatctgcaaaagctgtttttaggaattcaaaaatggataaacccagcgctaatttggcgtattgatccaaataaccaatcttgatgttcttttgccaggttactttaccctcatctggtaaaatagcgcctgttaaaatgttaatcaaggtacttttaccgaccccattttgaccggtaatccccatgtgttcgcctttattgacctggaacccggcgtcatcataaagttgtttgtctaaaaattgttgacttagtccttcgacttttaaaatgctcattgtcttttcctactttctttccaataaaaaacaggggtagcatctagctacccctgtcgcgattacaatcactgactttatcgaccgccatctataaaagacaccacaaaataagcaacccaaaagtcgcatattaccgtgagcattcttctatagatgacttttaatcaatattaggctctacacgctgtgtcatcttcaaatgtgtagagcaaagcttcataattaatggccgttcaattgtcattgttctcgacaccttttcaataagttaggttaatgttaacacagttctaattgggaagcaaaatcgcttagcctacccgatcacgtagcttagccaataattccgcacgtttccgccgtggaataatcaagcgtaaatcaccacgaataataggatagtccttggcattcccgtgcatcaattcagctaaatccttgctgtccaagccttgattgataacctcaattttaatcatttcggctaaataggtactataaaaagtgttatagcctagatagagtccaataatgacactcgctaaaattgaaagccacaaactgatgtgtaaaatactgtacaaaattaacataccacagatgattgaaatcactgcagcgacaattcctaatatgaccgtatgtcttggggcatctttcatgtgcgccaccttcttcttaaataatcaataataatcctaatatagcggagttgcgctcaagaagcaatcaaaaattaaccgcttccttctattactattatactgaattacgcagcactttagcagttaaatgacttaaaaattgcttaaatagtcatccgcctttagtaaaatgggattctagctattgtaaaaattatgtatatattgtaaatttttctgtttttatcgccaaaaacagtctagaattggaatagtgcttttttaatcttaatataaagaggataacttaaacgatatgaaaaacattgctttgaacatccgagattttttcttagatgacaaattacttctcgccgcaacgattgcagctattgtcacctcatttttcaatcgcccccatcttagttatgttaattttcacgtgatcgtcagcgtcttttgtattatgacactcgtccaagtttatcaacgactacatgtgctcgattacttcgcacgggaactgattattaagagtcattccaaacgtgctttaatgcagatgcttttagcactgacctttgttggggcaatgtttctaaccaatgatatgacggtcttaacttttgtaccgttgttcatcctaattgcgcggcaacttgatttttcaccgattttacctgtcacgttaatcacgatttcggctaatctcggttcatccctcacaccatttgggagcccgcacaatattttcctcgtatcgttctaccatatgacgattcgccatttctttgaatattcaatcccggtcttaattgttagtatcattatgttgaccgccacaacgtttctttttccaaaggaacccatcaaactccatggtctccatccagttgaagttgaaaaagggcctttatggtatttcgtccccctcacagtggttgttttcttagcagtcttctcattgattccattatgggtcacacctatcttggtcatcattgcgattttagtatttgatccgaagcttttcaaaacagtcgattatggtttattgttaactttcttctgcttcttcatcgcagttggtaacttaagccacatcccaacaatcgcaactttcatgcgttcacttgttggtactgctaaacaaacctatcttacaggcctcattagttgtcaattaatcgctaatgtcccaactgaaattttactatcaagctttaccaaccacagtcacgcaatgttcttagccatcaacatcggtggggtcggcacaatgttcgcctcacttgctaacttaattgcttacaaacgtttcaaaaaaggctggggtaaagatattggtaaattcttagtcgtctttactggtatgaacttcttgttcttaatcatcttaggaacatttggctacttcttaatctaatcacaaagagcaccaagacattagtcttggtgctctttttatttgtgttaaaaatagtcccacaacatcggttgcgtctgattgaaggccgcgcttaactgagcgattttagccgcatcaccactgacctgaccgtaatgcgcttgcgatgccagtgtgcgatagcccatcatcgccttggtgagctgttgaataattaccgtgatatccgccgtttggctcgccaatttcgttaccgtcggttggcccgcgtgtaaacttaattgccaaacaccactattctcgggtaaaaagtcatcgctaacagcaatcttcactgcctcaaggtctgctacttcatacggataacgtgctaagaaatcagccaacgacacaatccgcgccatcatatagggtatcgttgttgtttcaacaattgtcggatccggtaataaatcacccaagttagttgtcaaaccactctcgtagcgaatggtttgataggccgattgatgtttaaaaatgaacttaaccagttgttcctgactggcaaccgttgatgtcaataactcttgaatctctaaagttgtcgcctgacggctataaatcacatagcctgctactttttggtcgccgtcagtataaacggctacttcccaatcaatatgcttcaaacaattatactgccaccaccacgcggcccgttggataccgccaacctggttatgcggatgttgctgttggaagacactgattaatggcacagcggcgcttaacgataatcgttcaacgtacccttgatccggcgcaaatttaagacgcggcaagtccgccgttttaatctgataacaagtttgctcgaaagcttgttcataaccaaaccgccgataaaaaggatacgaaaaaggcgctaaataagataacgtgacgccatctgcttgcatccgctcaaaagctaagtgcattaaatcagagatgccaccttggcccgaaaattctgggtaactggcaacataaccaataccactcatcttaaatgtttgtcccttgaaattaacattaaacggcgtcgctaataaactactcttcaaatgaccctgatcaaaaacgccaaaaccgacactgttctgatacagtttttggaagaataaccgccgttgctcactatccggtttattaaaggcgtattgggcgaggtcgtaaaatgccggttcatcggttgccgagagtactcttttttcaatcatacaataaccctcctgagtttacttctccttaactataggggagcgtgccactcgttgcaagcgctaccgcttaatcgtaaaaaaaagagctgggctaaaatgaattttgccgcaactcttttgaataataacttttttagacaactaaactcaatagtaagacgccaactaaaccgacaattgaaattaatgtttctaagacggtccacgttgccaatgtttccttaacgcttaagtcgaagtattccttaaacatccagaaaccagcatcattaacgtgtgatgctgctaaactaccagcaccgattgaaagcaccatcaaagcagggttcacgcctgctgattgcatcaatggtaatactaaaccggctgctgttaatgaagcaacggttgctgagccaagcgcgatccgcaagacaacggcgattaaccaacctaagacaagtggtgataagctcgcatgcgcgaataatgttgtcacgctatcgccaacaccgccatcgattaagatttgtttgaaggccccgcccccaccaattactaagagtaacatagcgattgatttaaccgcttcttcaattgttttcatgattgctggtgtcttaatacgacgaccccagcccattgtgtacatcgctaatagcaatgaaatggtcattgcaatcgctggtgtgccgataaaaccaatgattgaatctaataaggttgggttctttggtagtgaaccaccgttgaataacatttggtaaaccgttgtgatcgccattaagattactgggaataatgaggtcacaacactaataccgaaactaggtgtttcttctaatttaaacgttttctgaggaccaagtgccgtcaagttcccttgacgtgcaaaggcgtctggaatcattttccgcgccacttttgtaaaaagtgggcctgcaataatcacagatggaatcgcaataatgacaccgtacaataaaacatgtcccgcattagcacctaaagcagatgtaatcgcagttggtgctggatgtggtggtaagaaaccatgagtcacagataaagcggcagccattggaatccccaagtataaaatcggtacgctcgcttcaacggcaatcgcaaagacgattgggactaataggaccatcccaacttcgaagaataaggcaatcccgataataaatgacgccaacataatcgcgatttggagtcgtttcttaccaaatttatcaattaatgtgtgggcgattctaaacgccccaccagcatcagcgacgagccggcccatcatggcaccaaacccaaagacgattgataattcacctaattgtccgccaatcccattttgaacactagttgcaattttagtcagtggcatccctaaaccgacacccacaaccattgctgttaacactaacgaaacaaacgtgttcagtttgaacttaataatgagtagtaataataacatgatgcctaataataagactaagagttccataaccattcccactttctattttgtttgcgtttacattgaactaataaattaaacgctcaatcccacttttggtgattgaacgtttaatctttaatccttagttgcttctttaacttgcatatgtctgcgttggaaatcagcaattgcactgtattctggactcaattcccgagtgaggcgaatccaaattggaattagttcgcggtaaacatcgaagttttctgcttttggttcgtgaatatttgtcacaccaatcatgtctttaacagctgagagatcatccactaaacctaatgaatacatccctaaaactgcggcgcctaaacatgaactttcaaaactttctggaattgtcacatcttgttcgaagatatcagctaacatttgacgccataattctgagcgggcaaaaccaccagttgcttgaatactcttaggtttgccagcaaccccttcgatcattaacatcaccatgtagagattataaacaatcccttctagtgctgcacgtaccatgtgagcccgtgtatgttgacgtgttaagccaaagaatgaaccacgtgcatcagaatcccaaattggtgctcgttcaccgcccaagtatgggtggaataataatccatctgaaccggctggaatcttttcagcaatttgcgtcaagagatcataggttgacacttgcatctgttcggccgttaatttttcaggcgcaaagagttggtcacgaacccaacggaagacaatcccaccgttgttaacaggtccaccgacaacccacttgtccttagttaaagcgtaacagaataatcgaccatttggatcaacgactggtttatcaaccaccactcgaactgcaccactcgtcccaattgtcactgccaaaacaccaggatcaattgcattaacccctaagttagataaaacgccatcgctcgcaccaaagataaatggaacatcactactgattcccgtttcttggctgtaagttgtatctaaacctgtaatttgtgcagttggttcaactaattctggtaattggtcacgggtaattccggcaacttcaagggcttgttgatcccaatctagattgaagatgttaaacaagccagttgctgaagcgattgaatattccatcttataagtatggaataatttttggaaaacatatgttttaatatcaatgaattgtgctgcttgtttaaagaggtctggttgttcgtgacgcaaccaaatgatttttgataatggtgccatcgggtgaataggcgttccggtatgttgataaatctcgtgccctaatccattggcttttaattcgttactatatttagcagcgcggttatctgcccaagtaatcgcccgtgtcaacggttgatgattacgatccatcaaaattaaactatgcattgcagctgagaaactaacaccttgtaattcgccagcttgtacatgtcctttgcgcattacttttcccagtacttctacaacagcttcgaagatttcatctggatcttcttccgccatatcaggtacattttggtatagtggatagccaacattagcgtaggccttcacatttccctttaaatcatataggacagctttcgtacttgttgttccaatatcggcaccaatcatatatttcatcattaattacctcgtttgtttgttgtttaaaaccgaattatttcttatcgacagcgtggccaccaaattcgtttcttaaagcggcaacaactttgcctgtaaaggtatcatcttcaagtgagcgataacgcatcatcaatgataacccaattactggcgttggtacttgtaatttcaaggcttcatccaatgtccattggccttcacctgaagaatgcataatgccttttaaagattctaattctggatctttagaaaaggctgattgtgctaattccattagccaaccgcgaatgactgaaccgttgctccaaaccttggcaactgcttcgttgtcatattcgaaacggccatgttctaagacatcaaaaccttctgcgattgattgcatcatcccgtattcaatcccattatggaccatcttcaagtaatgaccactcccagctttacctgtgtacaggtagccatcttcttgggcgattgatttaaagatgggttcgattgtcttgaaggcttcagggctatcgccaccgatcataaagttcccattagcgttggcaccactcatcccgcctgaagtaccagcgtcgaagaaatgaatcccttgttcttttaaaagtgcattatggcgttctgaatcttcaaagaatgaattaccaccgtcaatcaccatatctccggcattcattttttcgcttaatgtttgaatcgtggcatctgttggtttaccagctggtaacatgacccacacaattcgaggactcgttaattgtgctaaaacatcgtctaaatccgttgccgctgtggcacctaagttaacggcttcttcaaccgctgcttgatttaaatcaaaagccacaacttcgtgaccgttccgtcgtaagttggctactaagttgatacccattttgcctaaaccgaccattgctaatttcatttttaagtcccctatctgcttatccttttatcttacaaactcattatatgtaaatttttttcacaatgcaagcgttttatagaaaattattttcgtatttttatttttatgctatactagggctaatcattactagggggtcccgacaatggcgcaagcaatcgattcattattacgatcttattatgataattttagcgaaaaatataagcaaatcgctgactacatcttccaagaatcacaattcaatcagcgtttaacgattcaagaatttgccgccaactgtggggtctccaccgcgacaatttcacgtttcgctaaaatattgggcttcgataattttcaagccttcaagatggcactcctggccaaagaagccaacacctcaccactttttcatgaaatcaatgcaaacgatacttttacaacgatggccgaaaaaatcttcagttctaacagcaacgcgctaaaagctacttggtcgctattaactgaagaacaacttcaaaaagcggtcgccttaatcaaccgcgcccatctgcttagtttatttggtttgggggcttccgggattgtggcccaagatggttaccacaaattcctcagaaccagcatccccacagtcttcaaccaagattatcatctacaactcatgcaagcgacaaaactaactaatcaagattgcgcgattatcatttcacacagtggtcaaaataaggacgctttagaactcgcccgcattctaaaagagcgccaagtcccactgattgtcatcaccagtttcggtaattcaagtcttgccaagctcggcgatatcaccttactttcaatttcagaagaaactaattatcgggccgaagcgctgcatgctttaatcgcccaaatcagtcttatcgatagcctcttcatgatggtggccgtcaataatggtcaagaaacagaacaaagctttaaggaaatcagagccgaaatcgatcgaacccgacaataaaacgagaactatcaaaaagaggtaccgacaagaaattgtcggtacctcttcttttttagcgatcaaccgtgatattttgggaaatgggtgccgtctcaccggcttggccatctctaagagaaccattttgaacggtgatgttaaccttgttccccggtttaggagttagcttaataatatcgataccttgtgcgccagcgtattgctttagaacaataccgccacctgctaagcttgttttattccccgcaggttctccttgttcttctctgtattggatgttttgcgcggccactatcgcttgtgcttcggctgccgaaataggactcaccgcactagtcgtcggttgactcgtattggcctgtccactgccttgcccactaacaatattggcaaagcccgtcttcaaatccgtattagcagtgacgctgaaatggagccggttatctggtgtccccttatcaagaccactggttgcccattatggaacgtaaataagtataagtgacccccaactgtcccgccatcgacatcgcaatagattgcaacaacgttatagtccgcactaccggtaccatcagtactccaagccgccgtcactggcgtatcgtcgaccgctaaatcggtctgggctaacttactaggaaaatgaataccagcataatcagtatcccgtgttaaatcgtaagattgatacgtttggcccatcgtcgttccccaaccactcataaaggttgccaaggcttgtttcttgctactatcccacaacgcctttgcttgtttggtctgcgactgtgattgtgcttgctgttttgtccgcgacacactcgaagtcgtttctttacggacttgcttttgactgctggttactgatgtcacttttttagaatggctggtactcgttgatttggtttgttgttcgcccttgactgaacaagcccccaattaatctatttttattttaacgacatcgtacccttgtatatcggtttgataggtcgttttatctacaaatggttcaccggtaatagtgaaattttcttttagatcactcactgcaattcgcaaactatcttctaaacgcttgcgactaccatcttcttctttatcaccttcatagagcacgtgctttttaacccgcacattaaaatcgaatcttaagtatttattccccatttgataatagaggctaagtgaccgctgcccgttaaccaataacgcgtggactaactgtccctcttgcggatttaaatggttagtggccccatattctgctatttgagcagcggattgtttcttcaccgcttgatcaattgctttaatgtttttaattgtgatttgatctgatggcaatccggccattttaaaagtcactgtttgattcttttgaccactgtacaaatactgaccgccatcgtttaatgctttagccagcgctgctgttgtcgctgtaaactgatcgccgttgctaatatttttattttcttttacaaacaaatcagtcacattctcgtgacgcccatgtgcagtatacaaaatctgaatcatcgcatgatggttggtacccgtatacttcttagtaaaatcacttcgcttaaaagtcgtaattcttgtttgtttacccaatcccttcgctttaaaagttttcgtaacctctttaaagtagggctggtccgatttgtcagtcaatgtcactttaaatttttgaccgttcttcaagccactggccatctcaccattgaggaccgttcgactcatatgcgaaagataatcgctgatacctgccatatctttttgttcgagcgataagttattaaagccattgccgtcttccaaatctgagacgctcccggcattattgacaaacgcagtcataacctttttactaattttggcttcatgcccttcataaagggcaacttttttaaagaccgccaactcactagccttcgtcaattcagctaatccatgtccgttgtagccctcgtagttaaattgggcaccgtccaataatgaatgcgccccacacccgctcagaaaaagtatcagccccagtgcaagcccccaaaaaagtaaccattgtcgtttcatatgattaatatcccccaatatcatttttaaccaccagttcttaaaattgacagtcccctgcttaaaatctgataattaataattgtattataccgttaacgaatcattattgctactttttttataaaaacgtagctttctagctcttttaacagtttaaacaaacctctatcgttaaggttagataatcatgataggagcttaccgaatgctagatacaattagtcagatgattcgcgaacaccgtaagcaactagggctaaccattgaagaactggccgagaaatctggcagttcttacagctttatttctcggattgaacgcggtgaagttgataacttaaaaatcaaaaaactcaacgatatcgccgaagcattggggattgagctaattgacttttttggcgatccagcactatcaggtgctcaaaccttaaagttggtacattacctaacacaactccccgaagataagcgtgaagaagtatcggctgcacttttaaaaatcattcaactctaacctaaaaaagacacgtacaagtcagcttgtacgtgcctttttttaatatctttaattaaaaaccatgccgccatcgataattaaagcttggccagtcatatagttagaatctggtccagccaaataagcaacacaagctgccacatcttctggttctgataagcggcccagcgtgatgtctttggcaaattgttgcatgccccattcatcatccttgtccgcattttgaccaactttatgtgcgatgtccatcatcattggtgttttaacgatccctgggcaataagcgttaaccgtaatcccttggtcagctaaatcacgggctgcggtttgcgtaatcccccgaatcgcaaatttagtgccaccatataaagcaagttctggattaccgacttgcccagcttgtgacgaagcattgataattttaccaccatggccaaggtctctgaaggctttaacagctgcttgaataccccagtaaacactaccgacattaatcgcatatactttttcaaattgttccggtgtaatagtttcgattggggttgttgggccaacacctgcgttattcacaacaacatctaacccacccagttcagcaaccgttgtttcaactgctgcaaatacttgatcacgatcagaaacgtcaaccttaactgcgatagcccggcccgtttcgttaatttcagctgcaactgcttgggcaccttctaaattgaaatcagcgatggcaactgcaaaaccgtcgtttgaaagacgctgtgcgattgctttaccaattccttgtgctgcacctgtaataaacgctactttttttgtcataatcagtacctcctaattgtataagttaattatacaattaaaacggttacaatgatagcgctatctattatttatcgcgataagcgggcaccgccaccactttgtgcgatagcttcaatttctgcttcactcattaaattaaagtcgccggcaattgtcaatttggccacactagccgctaatccgaattgcaacattttatcaggcgtaaagttatttaataacccatgcattaagcctgcgccaaaagcatctcctgcagcgactccttccataacgtgcatttgataagtgcccgtttcaaagaattgatcatctttcaataacaatgctaaccattcgctatcttcgacggaacgaatatttcgtaaaatgctggcaaccatttggcagttagggaaaatttgccgtacttgttgcattgctactttgaaggattctttttgcgcgataccatgactctcatcgccatcaaaggcttgaattccgagtgttgcttcaaagtcttcatcatgagcaatacaaattgtgacatacggcattaagcgtttaatcgttgcttgtgcctgttctggtgaccataacttcccacgatagtttaaatcacaaactactggaatatcgtgtgcttgacaatattggcaagctgcctcggctgcttgcgccaattcagccgaaatggcgggtgtaatccctgagaaatagaaataatcaatatcttcaaaaatcgttgcccaatcgaattcactagcggtcattgtcgcaaaactactatgtgcccgatcataaacaacattagttgaacgaacactggcacctttttcaaagaaatataaacccaagcggccatcaccgtattgaatcttagtcgtatcaacaccgtatccccgcaaagtttgcatacccttttgccctaatagattctccggcaacttcgttaaataagcgacctgatcccctaaaagtgccaacgaaacagcgacgttcgcttctgcaccaccatatgaggcttcgaaactatccgcttgtaataaacgttgattccccggcgtcttcaaacgcattaacatttcaccaaaagttaaaactttcatcctaaatccccctactgacgctattttatttctagtatacagctaaatgtaaggggttacaccaagtgcttgtaaaatcttaatatctgatacaaaaaaagtgtcacagattaattatccgtgacactttttctttatttaatttcggctaatgttttttcaagatgtgctaagacacgatctttacctagtaattcgattgaatctggtaatgatgggccatgcatttcgcgcgtcgttgcaatccgaattggcatgtacaatagacgacctttgatcttcgtatctttttggatgcctttgataatttgcataatccgtggtgctgtgaataatgtcaaatctttcaagcgttcgctgaattccttcaaaacaaccggtgctgtttcgttatttaattcttcaagcgcttctgcatctaattgttcaggttcttcgaagaagacatctgacatttcaacgatttgagctgtgtaactcatttgatcttggtataacgcgatcaaatgacgcgcccattcgatagtcttgctatcaggattttcggcgattttacccgctttaatcaagctgtccaatgaaagatccatgatcttgttaggatctgattgtttaacgtattggttatttacccattcgagtttcttttgatcgaaactagcaggcgatttgctcaaacgttttggatcaaattgtttgatgaattcttgacggttaaacaattcgctttcgccaactggtgaccaacctaataaagcaataaagttaaacatcgcttctggtaggtaacccaattcgcgatattgttcgataaattgaagcacagattcatcacgtttacttagtttcttacctgtttcagtattgatgattaatgtcatgtgaccaaaaattggtggttcccagccaaaggcttcgtaaacggccaattgttttggtgtgttggcgatatgatcgtccccacgtaaaacgtgtgtgatttccatcaaatgatcatcaacgacaacggcaaagttataagttggcatgccgtcacgtttcatgatgacaaagtcgccacctaaacgatctgattcaaagctgatttcacctttaacgatgtcatcaaacttataaacgtgatctttaggtaaacgaagacgaacaactggttgcaagccttttgctttagcagcttcttggctcgctttgatttctgcttcgctcataccttcgtattcgtaaacataacgaggtgcttcaccagcagctttttgtgcttcacgttctgccgttaattcatcttctgttttatatgattcgtaagcaagacccttttcaactaattcttgaataaggggtgtatagatttcacgacgttctgattggcggtaaggaccatagttaccaggtttgtctggaccttcatcccaatccatgcctaaccattttaagttatctaactgactgttttcaccgtctgcaatgtttcttttcgtatctgtatcttcgatccggataacgaaagttcctttattgtgacgtgcaaataagtagttaaataatgcggttctagcattcccaatgtgcaaatgcccagttggacttggtgcatatcgtacacggattttgttctttgccataaataaaaacgcctctttctaaaattatacttgtcttctagtttaccgttattaaccctaaaaataaaggctcagtcactaggaatccataaaaaaacagattgggttgccccaatctgttttttaccactaaattaacggagtggtgtccattgccattcttcaacttcaggtaaatcagtaccttcatcacgaatgtattggttgtgtttagcaaccatatcatccattgattgtgcgaattggccagcttgatcaccaagcacgtcaattgcgacttctttagataagttgtaacgatccatttggttcaagacacgcatgtcgaatggtgttgtgatatcaccattttcacgatagccatgaacatggaggttatggttgtgacgatcgaagaagatgtcacgcactaaaccctcgaaaccatggaaagcgaagacaactggtttgtcttttgtaaagtacatatcgaattcttcatctgttaagccacgaggatccactttaggtgaacgaagtttcaatagatcaacaacgttaatgaaacgaatcttcatgtcaggatattgtttgtgcaagattgagatagcagccaaactttcaagtgttggttctgtcccagcagctgcaatcacaacgtctggttcagcatcttgatctgtacttgcccaatcaataatcttcaagccgtttttaactaagacagttgcttcatcaattgagaaccattgttgacgtgggtgttttgaagcaatcactaagttaatcttttcttggctttggaagacagtattcattgttgccaataatgtgttggcatcagctggtaagtattcacggatgaattcaggtttcttttcagctaagtgcgttaagacacctggatcttggtgagtgtaaccattgtgatcttgttggaaaacagttgaagttgcaatcacgttcaatgaaggatacttattacgccatgcttgttcgtctgcttttcttaaccacttgaagtgttgtgttaacattgaatccacaacgcgcaagaatgattcgtaacttgcgaagaagccgtgacgacctgttaagacatagccttctaaccagccttcagcttgatgttctgataattgtgaatcaaggacacggccttctgttgccatgaattgatcatttggttctttgattggttccatccattgacggtttgtcacatcaaagatgtggttcaaacggtttgacattgtttcgtcagggccaaagattctgaagtttttgttttgatcattgtctttaataatatcgcggacatattcacctaaaacgatcatgtcttgcgcaacaactttaccatgttctgtgttatccacagcgtagtcacggtaatctggcaagcgaagtggtttaggatcaatcccaccatttgtaattgggttagcagccattcgtttgtcgcccttaggtgccattgcagcgatttcaggttttaattgaccttcagctgtaaataattcttctggacgatatgacttcatccaatcaactaatgcatcggcatgttgcatgtcagtgctatcaattggcactggaatttgatgtgcacggaatgaattttcgattggtacgccatcccatgtcttaggaccagtccagcctttaggagcgcggaagacgatcattggccataccggacgtgatgtatcgccgttttcgcgagcagctttttgaatcgcttggattttttcgatggcttcatccattgcagcagcagttgctgggtgcattttttcaggatcgtcgccttcaacaaagattggtgcccaaccgttaccttcgaagtattttgttaattcttcgtcactcttacgtgaaagaattgttgggttagaaatcttgaaaccatttaagttcaagattggtaagacagcaccatcatttttaggattgataaatgtgcttgataaccatgatgctgccaatggaccagtttcagcttccccatcaccaacaacaacagctgcgatgacgtctgggttgtctaaaattgcaccgacaccgtgtgataatgaataaccaagttcgccaccttcgtggattgaaccaggtgtttcaggagcagcatgagaagcaacgccgcctgggaatgagaattgtttgaataatttcttcatcccttcaacatcttgagaaatttctggatagatttctgtataactaccgtctaagtatgaatttgaaaccatgacttggccaccgtgacctgggccttcaacgtagaacatgttcaagtcatacttgttaatagcacggtttaaatgtgcgtataagaagttttggcctgagattgtgccccagtgtccgattggtttaactttaacgtcttttgcttctaagggacgttgtaacaatggattgtcttttaaatataattggcctactgagatatagttagctgctcgccaaaatgcatcaactttagcaaggtattctttacttgaataatctgtcatcgtaatagcactcctttttttaaaaaagcttctgataggttcactttatgaataagttgcgtgatttgcaacttttatgtttctgcttacatacttatcatactagataaaaactaaaagtcaaccatttattatattgggtcgtaccaattttgaaaagataaaaataacggtctattcccgaccgctgactgaaacaaaagtattgtatttcatgtactgataatgaagtcgcattgttgaaaattcaaatggcgtgccatcatccaaaaagaagatgccttccatgatacccacgggttcagttggctttagttgcagcttgtcttgatcatcttgcgtagaaggttcagcaaaaatggataaaaaggcgcgcgtcacttcttgatttttttccgtttctaaataattaaaaattgacccagaaataatcttttcagtcagtcccggcataatcttgatggggataaagccggtttcaatcatgaatggttcgtcatcaaacaaccggagtcgcttaatttcgtatacaaaatcatctggttccaaaaataagtcccgttgcaattctgcactgggcttgatgacttggaagtctaataatttaatccccggttttcgatcgccagccttaaagctatcggtaacccctagattagagccgctgtaattaaaaaatgaaccactctttaaatataaaggattaataaaggtgcctgaaccgcgtttcttaaaaatgataccttgattagccataacgtttaacgcccgcttcaccgaactacgactaacctgataatgttccgtcaacgttctttcgtcgggtaatttcatgctgggataagcacccgcattaattgccttttttaaatctgcaataattgtttgataaactaaatcagccatgccaaactccttttaagtcctttttagttcctgcctcattatacaggattctgtccgggcgtctacttttttagcgtacaaaaaaagtgttaaatagttatctacttaacacttcttcaacgattcttgagttgggctagctggattcgaaccagcgcatgacaggatcaaaacctgttgccttaccgcttggccatagcccaataaagtatgatgttattgcaacttcgcaatagcaccctactataatactattttatgctgagtttgtcactaccaaatccagtttttttgttattttttctaccaaacgaataaaccaaccgttgcggcagagagtaatgagaccaaaatcccagataagagcatgtagccgacgtttttagcaatcatatcattcttttcacgatcaactaagcccttgaaggcgccgatgatcatgccgactgttgagaagttggcaaatgatgtgacaaaaacggttaaaactgcttgataatgtggtgcaaaagttgtgattgaattttgaactttacccatgacaacgaattcgttcgtcactaacttcgtgcccatatattgtgcaaattcaaaggcgtggctgacatctaagcccatcaaccaggcaaatgggaacatcacgattcctagaagatgttcaagggtaatccaagggttaaataattgtaatactttatcaatcaacgctgccaaagcaacaaaggcgatgacgttagctgtgatgattaaaactaatttaccggcatttaaaattgaatcccctaagaatgagaagaatggttcgcgttcaatcttaccgtcagcggcttcttcttcaccaattactgaaccaccacccattttggcgattgtgtcttcttctggtgtcactttaaccggatttaaaatgttggtcacaataatagcgttaataatattgaccggaatagcggttaagataaattgtcctggcatcatttgtgtgtaagccccgataattgaagccgtcacacaactcattgacatcatcgcaagcgtcaatgtccgttctgccttcatttgtttcaattgtaagcttgaaacagctaatgcttctgtattccctaaaaacatcatttcaactgcgaaaaatgattcgaacttaggttgtcccgtgattttagctaaaccacgacctaaccatttgataatccatggtaagacaccgatataagttaagatatcaaataatggaataatcattaggatggggagtaacacactggctacgaaatccatctgtttaacatttacccaacttggtaatgcgaatgcaatccccgtgtaagcaacttgaacgagccaattaaacccgttggcagcacctaaaacgatgtcccgaccaactgaaaaacttgttaagaaccaagctaatacaaggttaatcactaacataattaaaactgagcgccaatcgatatccttctttttctttgaaaaaagaaagccgactccaataaaaactaataaccctatcacatttacaagcaaatacacgttccgccacatcctttgtttgtctttttgtaccattacaaataataccgttatcggcactaaaagtaaactggttataacaaaaacagcgtcatcaagtaaacttgatgacgctgtttttgactgttattttatcaaacaatcttagtaactactttgccactgagactgctcctgttggggctgttgccagtttgactgtggtgctctttgggaatattgggtcgtattatcttgggtggttgttgtgctggcggcttcactggttgtcgtgccatcttttaggacactttctggataaatcgtaaattcatcttgatattccgttgtcgcaaagttcgtgtttaacgcattttgttttgtttctgcattatcaatattcgttttctctaatccaagtgacgtccgtaaaacatctgacacgcgttgaatttcactggttgttggcacttggtatgaagaaccctcgattgttgcattgcgccctttaagataatcagagctaattgatttagccgctgtccggtaattagattgaatggccaccatatcatcgaaacttagatctgttgcaacactatcctctaacgtcttcaagattgattcataattggtgagggacttgaaggaaaccgctgatttaatcagcgaggtaatgacttggcgttgccgtttttgccgaccataatcaccttccggatcatcataacgcatccgtgaataatctaaggcttctttcccggttagatgcatcttgccttttgtaaaagtcgtattgtacttaaacgaaaatgggacgttgacatcaacgccaccaacggcatcaacaatcttcgacaaggcccccatgttaatcgttacgtaataatcaataggaacatcaaacatcttctcgacagtctttttagccatcttggaaccaccaacgttgtaagccgcattgattttttgcatatcaaacgtcttagtcccttgtaattccgctaaagtatcccgcggaatgctgactaacttcacttgttcttttttaggattgacggttgcaacaatcattgtatctgaattacctttgtcaattcgaccttcagcaccggtatcaacacctaacaataagattgaaaaggcctttttatttttaatcgctttagaagtggcttccgatttattaattttatcggctgcagacttcaactggctactgacccgcatcgcatatgccccgccagaaaagacgagcaccacaatgactagtagaaatatttttaatttccgatggcgtttgccttttttatatttatcttctcttgagccaaaaaaattagaattctgcataagtgttcccttctacgtcgtactagcgcgaatgttatgtatgttgtcattatagacgaattatcaaagcaaacaatcatttttaagaaaagttatacaattttaatatttattctgaaaggtttcacggcttaattatcgttgaaatatgctagaatatgtttaattattcatatttcatggaggtttattatgacaattcacaaattacccacacgctctgaagtccctgaaaacttaacctgggacctcagtaccattttcaaaagcgactcagatttcgaagtagctgtcgcaacgctcaaacaggcactaccagcacttgaacaatacaaccaaccgtttaaaacggctgatcaactcgtaacaacgattgaacaagtgctaacgctctttagacagttagaaacggtctacgtttacgctagcatgaaaaacgatcaagatacagctaataccacttatcaaggttatcaagctcaggtcgatgctttagcagctgacgtttcagcggcggccgcctttttagaacccgctatcctcgaaattcccgttgaccaattaactgactggcagaccaatgagccagcacttaaaagttatcaacattttatccagactatcactgatagccgcgaacatgtcttatcaggtcaagaagaagccctaattgccgctgctggcgatatctttggtgctgctagccaaaccttcagtgttttggataactcagatattcaattcccagacgttgtcgatgaaaccggccaaacgcatcaattatcaaacggcctctatagccaattgttacaatcaaccgatcgccaggtccgccaagacgtctttgaagcactctacagcacttatgatcagttcaaaaatacatttgcgacaacccttgcgactgagatcaaagggcacaactacctcgctcaagtccatcactacgacagtgcgcgccaagcagccctcgcacctaaagccattcctgaatcagtctacacgaccttagtcgaccaagtgaaccaacatttgccattattacatcgttatgttaaattacgtcaaaagcaattagcattaccgcaattgcatatgtacgacttatacacaccacttttaggcaaacccgctttgagctacacttatccacaagcacaaacaacagcgcgcgaagcattagccgtcttagggcctgaatacaccccaattgtggaccaaatcttcgatcaacggcaaattgatgtcgttgaaaacaaaggcaagcgcagcggcgcttactctggtggtgcttacgataccaatccgttcattctcttgaattggcaagacgatcttaacaacttatacacactggtccacgaaactggccacagtgtccacagttatttaacacgtcacaatcaaccttacgtttatggcgattatccaatcttcgtcgctgaaattgcgtcaacaacgaatgaaaacctgcttactgaatatcttttgaagacccaaaaagatcccaaagttcaagcctacttgttgaactactaccttgatggtttcaaagggactgtcttccgtcaaacacaatttgccgaattcgaacactatattcacgatgcagcagccaatggaacccctctaacggctgacttcatgtcaacttactacgctgacttaaacgctcactactatggcgatgccgtcgccaaagatcctcaaattgccttagaatgggctcggattccccatttttacatgaactattacgtttatcaatatgcaactggttttgccgctgcgacgacgctcgctgatcaaatcagtacgaaccaaccgggtgcactcgacaattatctcgcctacctcaaaaatgggagtgccagttacccaattgaaacgatgcaaaaagccggtgtggatatgactaacgccgattatctcgaacacgcttttgatgtttttgaacaacgcctcgatcaattagaagcattacttgctgatatgtaactattaaaaaaagtctggccagtggccagactttttttaatgactaacatgttgatgatataaaagtgcaataaagtaaaagatgaattctagcgttgcgatgaagaaggtcactggccaattggtaatataccctaaccacaaacctaaccaaacgcctaataaagccgctccgacagaaactgccaacatcgccggtacactcttcgcaagatattttgcaataaaggctggtaaggtcactaggataaagactaataacgaacccacgatttgggccgcgatactaacactaatagccaagaggattaggaaataaatcgataaccaattggtttttaatccttgtgcttgggcgccaattgaatcgtatgaatcaaagaccaagtagcggtaaaagagtaagatgccaaccacaatgactgctgacaacgtaattaactggtaaacatccgttaaactgatcccgataattgaaccaaataagatatttgttgcgtaactcgcattgcggttagatagcgacaagaataaaatgcctagaccgacaaacaaacttgaaatcgcactaatcgacgcttctcgtcttgattccttggcactcatctggccaattgtaatcgaactaatcatcgtaaacaataacatcccgtttagcggtgcgatgcctaagaagacaccaaatgaagcacctgcaaagccaatctcggcaagcgtatgcgctaaaaacgacatatttctagcgacaacaaagaccccgattaaaccacatgtaattgcaataaacgtactggcgacaaacgcatgccgcataaaatcaaaagttaacactcaaccgtcctccgctttaatctaattctaggttagggtctaattgactcattggccccatttcgtattgaccgcgctttaagaataaatattgatccgtatacttacgcgctaaatctaaatcatgagtgacaaaaatcacggttaagccatgcagacgatttagctctgccactagcgccatcacttcttctttagtttcaatatccaaactggctgttgattcatctagaatcaagagatccggttcactgattaaagcttgcgcgaggtacgccttttgtttttcgccaccagaagcattgccaaccgttgttttttgaagggccgttaaatgcgtctgggccaaaatcttatctaacgcttggcgctctgacttcgtatgccaaggcagatgcttggttaattgattaaggctgacaaagctccgaatagagagcggatattccgcttctaaattccgaaattgcggcacgtacccaatatttaaactttgcttgtctggcgaaaaagtcaactcgccggcggtcggttgcaaactaccgattaagattcgcacgagggttgttttgccaacaccgttagggccaatcaaactcgtcatgctaccacgttcaattttaaaattaagatcctttagaacctgacgattactgaaggtcattcctaaatttttgacacttactaattctgtcattttacgttttgagcctttcctactgcatcaaattgctgctgcatccaagttaaataggtttgtttagctggtagtgtttctgtcacctgaacaactggcactttttccttcgttgctaattggtgcatctctttaattgtccgactttcttcttgcttgttaacaactaaaaaggcaatttgatgttttttaatgagttgacgcatagcgtcgatatcttgtggtgatggatccgtaccgtcttcgatagctttagcaaaatgttggttagcaacttgataacccatttctttcaacgcataatcgaagactggttcactgaccgccactttttggcccttagcttgcgccttgagccctgccaattgtgttttcaaacccgctaatttcttcaagtaagcttgaccgttcttttgaaaatcagctttatgtgctggatcaatcttactaaaacgcgtgattaattgtttagtgagtgttggcatggtctctaaatcataccataaatgttcattgtcgccatctgttcgtttcattagtttattgaccgtgatcattgtttgctgatctgaatccgaactggctgccaccttggataaccactggtcatagcccagaccattttcaatcacaacatcggcttgtgcaaccttcttagcatcttgagttgttggttcgtatgaatggggatctaaactagggctgttaataattgacgttacttgcccgtgcttgcctaagaccgcttttgcagcttcaccgtagaaatctagtgacgagaccacctgaatacccttggtagtctgtttagtctgaccacaaccggcaaccaccattgcgaccattaataaaagagcgactatgcccaatcgttttttattcatctctttctcctttttaaatcgtaatagttacgctttacttgaattattttacaggagtccgcccgtttgtcaatctttttcagaaaagaacgtcatcaaaaaataggaattgcgacaaaataatttctgcctcaactcctattagtcgattaccaaatttgttcaacctgaccgtcttgggttacaaaatagcctgcccgaggtgaatcttcgttaggggcgtagcaattaattaaataaccttgttgtgcattacgtgtgatcaacccgttatttaagtaagataaatgcgcttgtgtttgaccaacttgttgcatgactaagcgaatcgcttgattgccatccacagttgttggttgacttgtttgtggttggttagtcgttgctgatgattggctattagctgatgactgtgcgcttgattgttgcgcactttgactctgtgtgccctgcgattgactcgtttgactactttgactagttgttgcttgactaatttgcgttgaagcggattgactgcctgctgatgtcgaatcagttgcacttggtgtttgactactttggctcgtcacttcagaatcacttgttgattctgaaacagattcttctgacgattgactttgtgctttctttgaatgacttgtctttttaacacttgtcacttttgattcagatgaagatgagctctttgcttcttgcttttgaccgcaagcactcaataataacaatcctgaaactaacaccgtactcattacaactgattttttcatcataaaccctccacattctttttttagcttaagtattgtgccacttgtttggcaatcaccatatcagttgggtaaggtgtatcgacaccacgcaccttctgataggcatccgcccctttagcagccaatacaacaatgtcccctggttggctttcttcgatagcttgtttaatcgctgttgcacgatcaatttcaaccgtcgtggcaaccttatcttgatcgataccggctaaaatttccgccgcaatggcagctggatcttcataacccggatcatcggtcgttaaaatcgcgcgatctgcatattcatttaggacttgcgcaaaaccagcccgtcttgaaacccccttatcaccgggactcccaacaaccactagtaacttaggttgattgtattccttttgaaggaagctcaatagtgccttcatgctagcgtaattgtgggcgtaatccacgtaaacttgaccatgaccttcaaccgctagggtttccatccggcctggaatctgcaaacgacgaatgccttgttgggcagcgattaaatcagccccgcctaaggctgcaccaataatggccgccgtcgcattactttcgttaaaatcgccaatcagccgtaattgataatctccagaaacgcctaattgaatcgcttttttagaaatggcagttactttaaagcgactttcagctaaagtcatggcttgatttccaaagcggaaatcaatgtccactggttgtgctggttgataactcgtgtccgcaaataagtagatattttctggttcagttgtcgttgtcgctgcagcgtacacatcaccgaagttttgtgtttgcgcgttaatcacacagtgccgtgaattaacgagtaattgcaatttacagtgtaagtaatcttcaaagttaggatgttcattaggaccaacatgatcgggtgaaatgttcaagaagaaaccaacatcaaatgttaaaccgtaaacccgatttttcttataggcttgtgatgacacttccattaccaagtgcgtcatgccgttttcaacagcctggcgcatatcgtggaacaagtccaaactttcgggcgtcgttaagtctgacttaaaacggtcctcaggtttaggccccagtacccgatcaattgttgaaaagagtgctgtttttttgttagtggcatcttgtaagattgattgtgtgaagtaagaagcagtcgtcttccctttagtccccgtgtacgccacgatgaagaggtcgtcttgtggataatcgtaaaaggcagctgacaagacagccatcgccttttgcacattcgtcacgattaacgcgttcatcccgttgccttcaacaattggttgttctgcaacataagtgaccgcgcccgcttctttagcgttcgttaagaatacggggcggaaattccctttacagaaaaagagggtatctgctgtcaccttacgcgaatcataggcaatccctgtcatattcaagtttgaatccccgttgagggctacactttttagtaaatgatgctcttttaaaattaatgtacatgcatccaatgttaaagccattttcgtcctcctagactcattatgaattggtttaattatagcatattcaagcctaaaccgattgaataatgctgacaaatcggcgttattatcactaaaaaaggaatgcttaaacgatcgattctcgcttaagcattcctctgatttaattaaaataaattagtgaaaaattcacgaacacccgtaccgattaagacaaagacattagcttttggatcagccgtcttggtttgtactgtatattgcggtgtcatccctaagtaacggtttgtcacgcccacaattttcggtgtcactttaccgatgacggctgccttcttaacaggagccgttagttggcgcttttgaccaccttgaaccacttgataatcccaatcaacgttagcaacttgtgtgcctttaggaacccacattgcaattgcttgcggtgtttcaagcgcgactgtcttcgtccgaccatacttcacatcagccgttgcaaaaggtttgatggtcgccccttttttaacaagttgcgtttgttgccagttatcaaaaacatattgcatcactttattggtttcaataaaacggcgccctttgtcactaccgttagcgtgcattacaacggttaaaatccgttggccatctttagtggccgtcccggtaaaacaatcgccagctttatcagttgtcccggtcttcaaaccgtcgacaacgtaatctttgggtgcattattttggcctggtaacattaagttccaagtagccatcttcgtttcgtcgatcgtcttaggcccaaacgtaaaggccgtttgtttagttgtttctagcacttctgggaaagtcttcaataagtgttgggccacgatggcgacttctgaagcactcatttcgttttccgcatcagcggcactacctggatacgtctctcctgttaaatactggttattcaacccagaaacggaatataacttagcatccttaatgccccattgactgacttgttggcgcatcaaatcaacgaagttcttttgtgaaccagccactagattggctagcatcattgctgcatcatttgctgaagcaatcaacatcgcttgatataattcacgaacgctatacgccttatcagcttgaagtgggacgtttgttaactccttgtcctggctcagcttataaatggcagcgtctggtttagtcgtttgatcccacttcaacttaccctgtttaatttgatctaagacaatataggcggtgatcatcttggtcatcgatgcaatcggtaagacttggtcagcattcttttcatacaagacctgtcctgattggggatcgattgcaattgcggcgctagcgtcaacctgcggtgcgctagtggccgtagccgcttgaacaccttgttgcgttgcacttgtcgcaacagccactggtgtcactaataaaaggccagtcattaaaacctgtaatattcttttaaacacaatgctactccttaactgtttttagcggcgccattttgaggttcaatctgacgtcctagttttaaaggtaagtgtatcacaaaactagtcagttctggggtggaatctgcataaatataaccgccgtgcaaggcgacaatactttgcgtgatcgctaaaccgagccccgtcccaccggtttcttgtgaacgtgatgcttccacgcgataaaaacgatcgaacaattggtttaatgagtcacttggaatttgttgcccatcattggagactttgataatcgcctcttgaccaaccttttcggctgataaaatgatttgcttgccacctttgccatacttcaatgcattggcaatcaaattattgaaaactcgacctaacttttcagtgtcagcttccatcatcaatggtgcgggttggcattctactgtaatctgcatatttttcttctgggcttctaattcaaagctagccgctagctgttctagcatttgctccatatcaaaagtcgttttagcaatcggcgttgaggtttgccggacttttgtgtattcgaataagtcttcaactaagactttcatttgttgggccttcacataggccgtatgtgtgtacttggttaattcatccttggtttgatactgattatcttcaattaaacctaggtaaccaatgatggacgtcaatggtgttcgtaaatcatgactgacgttggtgatcagttcatccttactcttttcaattttgcgttcttcttccattgagcgaacggtgctatcaaccagtgtattgacactgtcaatcacgcgttgcaaatcgcgattaacccgcaaattgatgcggtgttctaagtgaccatcagcgatgtaatgtaattcaccaataacgtgccacatctgcatttggtgatagcggcgaattaagcgccaataaactactagcacatccgcaatccccatcaaaatcacaaaccagttttgccaactccagatgtgccaaccattagggccaatcgcaatcgcatttttaatcatccaaacaccaccgcgcaattgcggattattaacgattgcttgttgcaataggaccataattgataaatttaacaacaataaaaggatcaccgtaatgatcccctcagcaaacaactcactcttttctttggcagtgagttgtacttttttaaaatcttgcccgacttgatattcgttcattagacctcgaccttatatccgacaccccagacggtttcaatcactttttcgccgtcggttgcttcttcgattttatcccgtaaatgactgacatggaccattacggttttagctgacacaatactttcttgcttccaaacccgttcaaaaatatcatccgctgaaaagacccggttaggatggctcgctaagagatataaaatcccgaattcaagcgccgttaattggatttgtttgcccgcaatcgttgtcacctcatgtgaatcgcgcttaatcacaagtggcccaacttctagaatatcaggcacttcgtttgtcacctgttgttggctacgccgcaataatgatttcacccgtgccatcacttcaagcggattgaatggtttagatacatagtcatccgcacctgtgatgagaccttggattttgtccatatccgttgttttggcagaaaccaccaaaatcggcacttgtgaatccttgcgaaccgctttgataacttcaattccgctcatattcggcatcataatatctaaaatcattaaatcaatgcccgggttagtggcaattttagtcaaagcttccttgccggtaaaagcttgaatgggttcataaccttcatttttaacataaatactgagtagttcaacaatttctttatcatcatcaacaattagaattttcatattaattacctcatttaatttaaacatgtttgagtgattcgctattattgtaacaaagaatcggattggtaagggtaaagaattctttaaatccacccataaaaaagacgccggcgacaaaattaaatttgccccagcgccttcattttaacataggtttatcttgctgaataattaggtgcttcttttgtaatttgaacatcatgtggatgtgattctgttaaaccagcgtttgagatttgaacaaattgtgcattgtcctgtaaatcacggaggttagcagcaccaacatagcccatccctgaacgtaaaccaccaagtaattggtagataacatcgccaagtgcgcctttggcagctacgcgaccttcgataccttctgggactaacttgtttgcttcattcacgccactttggaagtaacgatctgatgaaccgtgtgacatggcagccaagctacccatcccacgataagtcttgaaacgacgaccttgatagatttcaaattcgccaggtgcttcgtcagtaccggctaacatgctaccaagcataacggcattaccaccggctgcaagagctttaacaatatcacctgaatacttaatgccaccatcagcgataattgtcttaccatattcacgggcgacactagcagcatcataaatggctgttaattgtgggacaccaacgccggcgacaatccgagttgtacagattgaaccagggccaatcccaactttaacaacatccacaccagcatcatataaggcttttgtgccttcagctgttgcgacgtttcctgcaatcaaggttgcttctgggaagcgagcccggatttcggcaattttacgtaaaacaccagctgaatgaccatgcgctgtatcaatgataatggcatcagcaccagcttttaatagggcttctgcacggtcaaaagtatcacttgtgacaccgacagcagcagcaactaataagcgaccatattgatccttagcagccttagggaattcttgaactttttcaatatctttaatcgtgattaagcccgctaagcgaccatcctcaccaactaaaggtaatttttcaattctgttttgttggaggatttgttcagcttcttctaaagaagtgcccacaggtgctgttacaagtgcttcgtgagtcatgaccgttccgatttcaacagagaagtcagagatgaagcgtaaatcacggttcgtaataatcccgactaacttaagttcatcgagatttgaaacgattgggacaccactaatgcggtatgtgcgcatcaaatcttcagcagcactaacaggtttgtccgctgttaaataaaacggatcaataataacaccgttttctgaacgtttaaccttcaatacttcatctgcttggcgttcgatactcatattcttatgaataacccctaaaccaccttgacgcgccatagcgattgccattggtgcttccgtaacggtatccatgctggcactcataattggtgtgttcaacttgatattcttagcaagttgcactcctagatcaacctcatttggtaatacgtggctctccgctggtactaataagacatcatcgaacgtaaaccctttttttgtaaattttgattcccatgcagacataatcttcctccattcatgaacttaatcggccatcaatcaactaaatgttcgtattaaccatcatgattaactgatttaaaatttgataaaatattagcagatttttcagtaaaggtcaatgggctcttactaaaaacttattttacgatcaattgtctttaaacagtttccgaacattcaaaataaaggtgcatatcatcaatcttcgttatacaatagaagtaacttattacaaaggatggattggcatgcaagaacaacaacgggttttaaatttaacacgtagctataatcttcgcgaactaggtggttatccaaccgttgacggtaagaccgttaaatggcataaattactgcgctcaggcagtcttaacgcactaaccgcaacagacattgaggacctcctaaattacggcgttgcttacgatgttgacttccgttcccgtcatgaaattaaggttgccccagatccatttgacgacagccaattaacctatcaccgtctttcggtatttccgttcaccgatcaagcagacgcccctaaaaaaccagcgaaaaagggattatttcatctcttcggtaaaaaagaacctgctacacccgaacgttcaagcatggaccgaatgtacgaacaattagtcacagactctcacgcacaagcagcttaccgcgacctatttaccgtattattgaataaccatggcaatgacggtgcggtcctttatcactgctcagctggcaaagatcgaactgggattggtacaatgctcatcctcagcgcattaggcgtagactgggcaaccatttcagatgatttcgtcctttcaaacgaagtcctaggcttaaccacaacggcacccactcgcatcagcagcaatgacgcccaagtcgcggcaatgaatggcaagagcgtttcaaaagcccatctcgaactcgtcagagaaacaatcgaacaccattacggcaatatggacaactacttagcccaagcaatggccctcaaatcagaagaaatagcgcaattaaagaaggactacttagaatagagtgcctttgcaagtgtttagattttgagcatttgcctaggccagtgaataagcgacgcagtcgattatttgcgggacgtagcaaagcgcagaaatctacttgcaatgacacgttttagctagagtgctcttgaagcttggtcagattttgagcattaacatagagtggcgaattagcgatgtaatcgctagtttgacaatcgtcgttaagcgcagaaatctagcttcaatggcacgtttcgactagcgtgcctcctttcaaagagacaccaaaagaggtgctcccaaagttaattttgggagcacctctttttaccgtttttagagcaattaccactcttccatatattaattatgcgcgctttttcatgtgattacaagactgttcttttcatattggacttgctacactaggtaaacaactttataaggggctgattgtatgacaaccgattttgaacaagaacaaacccacctaaccacaatttatcaacaactaacagccactttagcggccatcaacgatgcccaatcgcagaatcatcaggctggcaacaccatcaaggcccagattaccggtgaagctaaactcaattttgattcatatgctgataacctcgacacctttgccgctctagaaaccatcaataaagaaatcgatatgctcaacctcaaaactgattcattgctcgctagaaaagacgaaacgttacgcctcttagaacaaccctactttgccaaaattacgctaactttcccggaagaaatcgacagtgaggacttctatctcggttcagctagttataccaatcaagatggtgaacccgttatttttgattggcgttcaccaatcgctgatgtttattatcaacgttaaaagaagctaaaacaacccaaatgagcgccattaccgcgacaattcaaaaagaacaaaatgcgattattcgccaacaaacgactgaccatctcctaatcgatggcattgccggtagcggtaaaacatccgttatttttcaacgaattgcctatctcctctatcgacaacgcaaggaactagcactcaacgaagtcttgatgatttcacctaaccgcttattccaagactatatcgctcaagtcctgccagatctcggcgaacaaacaccggttaacctcactttgcaacaactattagcgcagttgctgccagaagagttggcagatcttcccattgcagcacaaccggttatcctagctattgaccaactaacattggaagcaagcgacttccagtcattaaatagcggcttacccttcacaattgacgccgctactagttatcaatttttcttgaagacgccggtggatgcaccattggacaaacgcattcaagccacccaacaacaactcacaagttatctacaggaacaattaataacaatcgccaaaacccccatgactttaacacgtttagaaagtttaacggaaaccgagcagcagcaaaccttcggacgcttaattcgcgaggacgaaccattaacaccgctcgctttaaaaatggtccgctatgattaccaagatttatctgagcaattacatgactatcaatggttggcctttgaccaaattattgcgcgccaatcaactatggatgccgtgattgcagcacaagtttacagttatttaacgcagcgcgttttccccaaagttaaacaggtctttatcgatgaagtgcaagactatcacgctagcacattgcacctttttaaacagcttttccccaaggcacaattcaccgtcttcggtgatcaacatcaaagtatcacacctcataaaattcaattcagtaaactgcccgcgatttttcctaatctaaaaacccaagcattgcggacgagttaccgctcatccggtgcgattaccgcgttattcagtcagttattccctgacttgactgatgttcacgcagtccaaccgcacggtgttcaaccaacccatctaagtgcgactaatgacgcggactacctggcacaaatccaagcgcaaatcgatcaactgcccgctgaccaaacattagcgattattacccctgccggtcagtttgatgagcgccttttaaagttaaaagatgtccaccacttatccacagaaacgaccaccctccccgaaagtggtgccttcacattaccattaacactcgctaaaggcttggaatttgataacgtcttgttatacgacttaaccaatgactactacactgaaccagcagtgggacgtaaccgcctctacaccgctatttcaagagcgacacaccgcttaacgctcagtgcacttggcaccttaccgaatgcattaaacgcataatcaaaaaatcccgattcagccaatataaaatggctgaatcgggattttttggaggcttgaaacgtgttccttcagccatatccttccggttagcgacgaatcacaaatgatcgacttcatcgctcattcgcaatccactgctaatcctcaggatataaccggctgaactcacactcttattcaaatacaaattgattgttatacaattctgcgtagaagccttcttgtgctagtaattcttgatgattgccttcttcgataattcggccatcttttaagacgataatccgatccgcatttaagatggttttcaagcgatgggcgattacaaaactggtccgtccctgaatcacattttccattgctttttggatatggctttcagtcaccgtatcaacgttacttgttgcttcatccaaaatcaaaagcgctggatccgtaataatcgtccgcgcaatactgatcaattgtttttgacccgtactgaagatattatcttcttcgctaaccttcgtttgatagccatcttccaacgtcatgatgaaatcgtgaatgtgcgcttgttgcgccgctgcaatcacttcatcatcagtcgcatctggttttccaaagacaatgttatcgcgaatcgtccctgcaaataagactgattcttgaagaacaatccccacatgtgaccgtaacgtatccaaatccatgtcacggatatcaacgccgtcaatcttaacggcgccttgatccacatcatagaaccggttcatcaagttcatgaccgtcgttttcccagagccagttggcccaaccaacgcaatcatttggcccttatcaacctcaatattcacgtcgtgcaggatttgtttgcctggtaagtaactaaaatcaacatgttccatcgttactgaacgttcaatcccgttgaattgttgcccattagttggacgaatctcatcatcttcatcaaagacttcgttgacccggcgtgcaccggtaattgccaattgaatcatgctgtaacttgatgagagttgcgcaatttgattatagaattgttgtgagtattgcacgaaagttacgactaaccctaaagcaacggatttcttgatatccccattgaccgctagccagctcccaaagaagatcacaatcgccgtattaaccagtgacatcccttgcatcaatgggaaaattatccctgaataaatttggcctttcaaggttgctttccggacactttcgttatgttcaacaaagccatcaatcgtttcagcttgtaggctgttggtaataatcactttttgacctgtgattttttcattgatataaccatttaacttacccacttcgtcttgttgcacattgacgtatttttgcgctttgttgataataatccacgctaaaataaacgaaattggcactgacgcgattgtgacccacgccaattgggtatcttttctaaacatcataattaacaaaccaatcaacaaggccgttcccgacactaattggcttaacacttggttcatcgcgttataaatattatctaaatcactcgtaaaacggctaaggatatcgccatctgaatgacggtcaaaatatttaatctgcatcttttgtaatttattgaataacccaatccgcatccggttggtcgataacgcattgacgcgtgaaaaggctgcgcttgagacaaaggttgcggctgaactcaagacataaaaaaggactaacgacacaatgacatcaataaaagcatctttagaagcaccactggttggtagatgttgcgcttttaaaacctgaaacttcgtggcgtatttaaccagttcattcaaagcatccccaatatattcgggtgccttgacttgtaaataagtggcaaaaacggtcatcacaaggatcagtgcaaaagatggtttatagcgttttaaataatggtagaaaaagaccatggcacgtttaaattctttcataatttagcctcgctttcccttttgagtttcgaaaatttcgcggtaaacagcacttgtttctaacaactcatgatgcgttccgacaccgactaggcgaccttcatctaaaaccaagattcgatcagcattgaccacggatgaaatcttttgcgcaataatcaacgtcgttgtatcggctaattctcgatcaagggcttcttttaccagtttttcagaatgggcatcaagcgcactcgtactatcatctaagattagaatcttaggttggccaatcacaccacgtgaaattgaaaggcgttgtttctgcccccctgagaagttggcactgcgttcttcaaccggtgcatcatacgtatcggctaatttctcgatgaattccttggcttgcgcaatgccagtcgcgcgatccatatcagccgtatccgcatcttttttaccatgtttcaagttctgcgcaatcgtgcctgagaaaagaatcgctttttgaagtacgaatgacactgaatcgtgtaagttatgttcgttcaattccttaattgggaccccaccgatacgaatctccccttttgttggatcgaataaacgcggaatcaattgggccatcgttgatttaccagcaccagttgcgccgacaatcccgatcatttcacccgcattaatttcaaaactaatatcgttcaacgtatcatgatcatcttctggataacggaagctgacatgatcaaaagccagggtcccagctaagtcttgatctggcacatcagggtacacaatatcaggatctgtggcgaggatttcttggagtcgtttcaacgaaactgccccacgagaagccatcatcatcatcatgccgcccataataatcgacatcatgatttgcattaagtagttcataaatgaggcaattgcggcgattgcttccggatctgtatcgactaagttaccgacgaaatagattgaagcaacaactgctaagttagcgaccaacataaatgaaggaatcatcactgaaaagagcatcccgacaattgccgtatgtttttctaattgatcactggtttttgaaaagcgattaatttcattatcttcctggacaaaggacttcacaatccgcgtgcccattaaattttctttagcgaggttgttaatcttatcgattaaattttgaatcgcaccaaagtgcttccccattgagcccattgataaaaaggtaatcacaaaaacgaggaccactaagaggatgataatccaccataagctcggaattgagttcatcgctaaaatgaaactgccgacaaatagaatcggaattcggaccaacgtttggagagacatcataatcacattttgaatctgggtcatatcattcgttaagcgcaccgaaagattcccaactgagaatttctcaatgttagcaaatgaaaaagtttgaatctttctaaaagtcgtctcccgaatatcggcggtcatcccttgtgcggtaatcgccgacgtaatcgtattgaccaccccagcaattaaaccgacaacggcaatcacgatgagataaatcccaatttgcatcactttatcttggtcatctttcataatgccttccaaaacgttttgtaatagttttggttgccatagtgaagacgcaacagacataatggtggctaatatagataggctaaaaacgcctagatatggcttcaagtgctgtttcaataacgacatgcgcatccctctttttcctataagttgattagcctgtacaagtcatgtacagtataatcgaacagtgttcgagttaatactttaacaaattttaaaaataattacaattcttttttctgaaaaataaaggcggtttattaagatggttaaacaaacaatttcagcagcccaaattacggccgctgcctttgaaattatacaaacaggcgggacagttgaacaactctcaattcgtaaaattgcggccaagctccacattggtgtcgcgactttttattggcactttgaaaacaaacaggccctccttcaagcaatggctgacgagattatcgccgggattcaatttccaccaacgacgacggctatgccttggactgaacaaatcaagctaatcttcaaaacaatttatgccacctaccttgaacagccttacgcagccgaattaatgttgcggaccgtccctgcgaccaaaatccgccttaatcttattaaccaactcttacaaatcttattagacgctggctttacacccgaacaaagtagcctagcgattgaatctatcgaccacttcatgtcaggtctcttcgccgatatcgcaggggaaattgagataaaacaacgcgcactcagtcaaactgatccttacctcgcacaacttccgctgaagatgaaaacaatcgctgccgacaatcatttcgatgcttttttaaaaacgttcgaacaccaccgacaacagcagcaacactccgccgaaaaattcatgttgggcttagatatttttctcgctggccttgagcagcaacgccattcttaaccaccaaaaaaggacttgagacaaaaataattttgtctcaagtcctttttaattacacttcgttatttcgaattactaacccgtaccaaagtgccatcacagcgacaatcgttacgatatacaatggcaatcgactgattacgcctgtatgcaacaaactcatgccgtaagtcaaagcactgattgcaaggtaataaccaaaactaaatagtccactggcagtgccaatcaccgcttcataaccgactaatgccaggtttaaaacgaccggtaaagtcgtatttaatccccaaaagacgattagaattaagatgaccatcaataacagctgatcatagtaactggcaactaacaataacaggctccccactaaagccagcactaagccaattttagccatcatcaccgctccaaacttgggtgcgccgtaattggtggtcattgcgcctaaaatgctagcagcggctaacacaagccctaaccagccatattgaaccgtactgagatgaaaatggttgataaagataaacggtgcttcagcgtaataactgaataagataccgttgatgccgctaatcacggccccatagacccagacttttttatccgtcagcaagcgtttcgtcactgccccgacattgatctgtgccggcacaccagctggccgtgtttctggtaaacacgcacccgcgtataaaatcgcgccaacggctatcataattaacaccgagaaaacttggcgataaccaaaataggtttggacaagaccgccaatcaacgggcctaaggctggtgcaagtgccatggccgcaccaactttggcaaatacttgggccccgcgcacaccactgaaggattcacgcataatggtttgtgtcaccactgaaccaacactcgcgccaaaagcctgtactaatctcgctagaattaaccaactaaaatgaccggccaataacaggccgctattcccaagtaggtagacgccgatacctaacaacatggttagtcgtcgcccgagctgatcggataaccagccccagaataaaacaccaaaggcaaaagccataaaataggtgctcatcgtcaattgtgccgtttgcgcactgacgtgaaaggcccgactaatcatcggtaagacgggcgtaaaaattgattcgctaatttgtggaaatcccaccaacacaatcattaatagaattgatggacttttttttgagacgtttttcattttaaaactcctaattaatttaatctgctgaaaaacgtctttagtcacttacggtcgcactttggataaattgtgaataactcatcttcaaccctcctcatttaatttagttgacttgttaaacaattcctaccaatatatcaaaaaagcattgtgaattcaaggtatagaaaaagaggcctcgaagagacctctttaacgtgcttttcagcatatatttttccggttagctacgccacgcaaataagcgacttcgtcgtttattcacgcagctatgctaatcctcaaaatatccctatgctgaaaaccactcacttttttaccagcttgcttttttgacgcctgggatttgccctttgtgggctaattcccggaaattgatccggctcatcccaaatttacgcatgaaacttcttggtcggccatcaatcaagtctcggttacgtagacgaactggacttgaatcctttggtagttgtgctaaagcggcgtagttgccttccgcttttaaagtcgcgcgtagatccgcatattttgcgactagtgcgcgttgttttgccaattttgcaatctttgatttcttagccattgaatggcctccttctattattagtattgttgctatttccctcagaaaatagcctgattagacacccaattcagctatcctataccaaaccgcttcgaaattcaattaaaaagacttacaaaaagtaactatattctaattgcaacgatatatcgtccctatgctatactttaaataagatttcgcttagaaaggaacttctatatggcacagaaaaatattctccagtacttactcctcggtctattaaatcaggcgcccaaaactggatacgacctcaaacgcgtttttgaaaatgaaattggtgaattttggcaggccaaacatagccaaatctatcccgaactaaaacgtcttgaaaccgaagctctaattacccatatcgaactcatttctggcactaaactcaagaagaagcaatacacgattacccctagtggtgttagctatttcaacgaatggcgttattcgcccaccagtgaaattctcgctagcaaggacgaattcatcctcaaactctattttatcgaatcaaaagatgatcaacatctaccagctatgtttgcggaacaaacaaccttgcacaccgataaaatcactcatttattggcgcgtaaagcactcgtcttccctaaccaagccacaatcactgccaattatggccactatctgattttagagcatgcaatcaatcgtgaacaggattacctaaaatggctagccacggctgatcgttaatctttttaatccacccttaacaaatctcagataagtgctatgctataagaagaagtaaatcaagttaggctgttttttcatttgtatacgttataataacgcgcttgtacaggtggtcagttgaccaattgtatgggcgctttttattttgactaaacaacttagactttaacaaacacaggaggaacattattttaaagcgtaagaatgttgataaagtcgtctttatccccacgatgttattgttcgggattgtctccgcatttctaatgttaggaggtgacacactccagcactctatttcgcaattattggacacgatgacgtcccattcccaatggctctacataggtatttatattattaacttcatctttttagtttggttgggctgtagtcactatggccggattcgtttgggccaacctaacgaaaaacctgaatataacgattttcaatggggtagcatggtttttgccactgggattgatgccagcatcttaatgctcagcaccacggatccactccaatacttacaaaatccaccatttggcgctaagcccttttcagcagcggcttaccgctacgctaacgtctgcggtcagtttaactggggaccaatggcctggatgatttttgccaccgccacaattgcgattggctatgcactctatgttaagaatttacgcgttcaacgcttgagtgccgccatcgatttattagaaggccctcaaacttacaaaaaggttctccgccaactcatcgacttcattgtcgtcttcgggattatgggcggaatcggctcttcaattgggatggaaatccccgtcatttctaaagtccttagcacgatgactggtttttcagatactatctggttaaaactagccttgttcgttgttttattcattctcttcactttaaccgtctacgctgggttaaataaagggatcaagaaactgagcgcttggcatatttacaccgcgattggctttttattactcgttttattaatcggccccacccgtcatctgattggtgctgaaggtcacaatcttttccatctatttggtaaatttgggcaactcagtttaaacgcaactggttctgatagccatttcgcccaacacgaaatgctcttttattggggttggtggttatcttacatgcctgtgatgggcttgttcatcgcccgcatctctcgtggccggactattcgccaagtgctacttgggatggccacttatggtgcgcttagttgtatgagtttttacgccatcctcggcggttacgccctcttcttacaaagttccggtcaagttgaccttgttactttattgaacacacaaggccaagccgccgttatcgcggccgtcattacgacacttccttggaagattgtcatgctcgcgattttctgtctatcttgtttcattttcctagccacgaccatttcatcatcagccttcatcgtttcgtcatttactagtcttgaattgaaaattggcgaacaacctaaccgttggaatcggatggcttgggttgtcattttcattttattttcactcggaattgtactcgtcggtagtttccaaaccgttcaagcggtttgtgtgattgcgggcttcccactgatttttgtctgtgcattgttactcgtttcgattttccatgccgtccataacggtgaaattccgatcgaaattgaaaatgaagaaacttctcattttctaaataaaaaaacatctcttattaaaattaagagatgctcctatatttttaaaaatacataccaacaatcgtaccagttagcattgaagccattgtagcacctaacaataatttcatagtaaattttgcaacaacagcaccttgtttctgatcaattgctttgattgatcctgaaataataccaatcgttccaaaatttgcaaaactaactagataagtcgagataatagccgttgcttttggactcaatgaatgtgcgatctgtgataaattccccattgcaacaaactcatttgtaattaactttgtggccattaagcttccaaccttaacaatatcgtcagctggcacaccaataacaaatgcgacaggtgcaaatacccaaccaataatatccgtgaaagtgacattaaagaaaaagccaaatgtattgtttaaaaacgttactaatgatacaaatccaattaacattgctgctacggttaaggcaagttgaaaaccatcaacaatataattacctaaaacttggaagaatggttccttttcagtggagagatgcgcttctatcgttttttgatcctctacttctggttcatacggattaacaatacatgaaataataagggctgaaaaaatatttaagaaaacagcgacaacaacaaatttaccgggaaccattttcatataagaagccaacattgccgcacttaccgctgacattgcggatgcgcagattgtatataaacgttgtggtgataaattaggaattcgttccttaattgttagaaaaacttcaggttgccccaaaacagctgttgaaactgcaaaataactttctaattcacccattcctgataatttattaatgccttttcctaaccatttaataataaatggtaagaccttaatatagttcaaaatgccgactaacgccgaaataaatacaattggcatcaatacgttgaggaagaagactgaagcgccactcttaattacaacgccaccaaaaacaaaatcgacgccacctgcagcttgccccattaaccaactaaagaaattagaaatacctgccaacactttaaccccacctgatgtatgtaaacacaggaaggaaatcacaaattgggtaactaataaaataccaatttgtttatatctaattttctttcggttggaactgactaaccaaccaatcgcaaatataaagactaatccgactatccccattaatatactcataataacctccactttcagctatctagccaaagtttttcaataacatcattgcgccctcttgatcaatttgcttaggtgtatttcccgcaaaacgttcattaacgacactttctatattagttagtaattcatcttctgagatattaaaatcagtgaatggcttcatcccaagaactttatctctaaattcacgatattgaatagccgtaattctaccgatttcggtatctgttggatctgcggggtattcagcgcccaaaatcaaaccaatttcttttacttttttacttctaactggtgcaataaattgaagtaccccaggcaacgcataagcacaagccattccatggggcatatggtacttagatccaatcacatgtgcaacggaatgaccagcatgtgtccctgcattatttagcatccaaccacctagtgtagcagcgaccatcacacgttcacgtgcttctcgatcctgtccatcttcaattaccttaggtaagtatttgactagtaaatacataattttttcgcaaatcgcatctgtgacaggactcgctaaggttgatgtataaccttctgccgcgtgtgaaaatgcatctaagcccgttgcaattgtcatccctttaggtaatgtcattactaattcagggttcaaaactgcaaattcactaactgcgttattcgctaacaccgctaatttggtctgattttctgtatccgtaacgattaatgcattcgataattcactccccgtaccagaagttgttggtactgctatcaatccggggcaatcttttatttcgttacttgctgtgacgtattcgctaattttgccaccatttatacgaacgatattaattcctctagcaacatcaatggcactgccaccgccaattgcaattaaactatcacaatcttgcgccttaaaaaattcagcaccttcatccaccacagttgttggcggatcagaaacgactttattatagatagagaattgaatattgttctccgtcaatttaacttgcaatctttttacaattgcaacttcttttaaaaaactatccataacaattaatggctttttatattgtgtttctttcaaaatactcaaaatcgttttaggtaaatcatcggttactaatactttggtcttttgaactaatttataatccattttatcctcctaaattctctcaccgtataacaattggctaaataattggcttaaatattgaattgctggtcctgttgttaatgccgtcagaattgtgattgcaccaaaccgaccacccaacaaaacgccagcaataatcaaaacaacatccattgttattttcgaacggcgaatactccagcctgttttgtcccggagtgttaacattaatccgttaaaaggatcgacaccgatgttactagcaacaaataggctaatccctaaataatataaagaacaaccaactagaccagctaaccctcgtatccatagcgtattacctacaaaaacgacggtatacagataactacctatgctgataaaaaagccatagggtacaagatagataagtgttccgacattaatatatttccgtccaaagaaaaacaaaataatgatcaaaccagtattaatataattggaagccacgcctaactgcgcatgtgaaagctgagcagcttgtcgaataccatcataaataattcctaccggatcattacctagttgtgtgttgttattaatcgctactccaacacagactaaaaatacaccaatgatcgcagttgccattttctttagcgataccgtcttaaaacttgtccatattattttcaatttttataagccaacttctgcagcagccttatctgctctttcacagaattcacgcaccttatcgatatctttttccatacgaccgccatcatatttaatacttgtctttgttaatgaatcaacgccataaggtttaatttccttaatacactcttcaacattatctggtcctaagccgccagcaataataactggaatatctacattagcaacaattgccgcatcaattgaccagtcatgtgttaatccactagcaccaattcctgtatctgcagctaaaccagaatctgttaataagtaatctgagaattttgcatattctttagcacgttccactgcttccggtccatctactaaaacggcttgcattaattctgtttccgggcaaaccgctctcaattgatctctaaacgcttgatctgcagtatattccatcccagcaatgtgcaggatatctggacgaacccgtttcgcaatatctaacatttctttaggatctttgttcaacatgattgccactgttacaacaccacgtcttttggcttcagcaaaaattttatcaacagtttctaatggcactcgatgcgctggcacaccgccatcttgcattggtacaagcccaatatgatcagcacctgcatccattgtttttacgctttcatcataagtaataagtgaataaatttgttttttaatcattagtaaatcctccaaaaattagttttttactgcttgtcgacaacgatcaatcacatttttcgcagttaaatgtgatgaaacggctgaagcacttcccaccgtaatacttgaagcagcttgcgcatattgaccaatctcttttaaagaagcctttttcccaaagtgataatatgcccaagcaatggttgccatgctacaatccccagcaccattacaacttataattggtaccttaataatcggtactagtactgtttgactttcatctgcacatagaataccgtgtgcgccaagcgagataaagacatgacgaattccttggttaactaaatattctgctgccattttagctgagctttcatcggatattttaattccagttagaagttcggcttccatttcgttgggtttaaacgtatcaatttcatttaaaacgctttcaaaacgacgcgctttagcgactgaaaccggatcaacatacatcggtaccttcaaatgatctgccaaccattcaattgattcttgcggaatattagcatctacaatgcataaagtggcctgattaattaccgctaatcgttcctttaaaaaatcaggagtaatattattaacgatactcatatcattaattgccgctaacatgtctcctgagccatcagttacataaagataggttgaactattagcgcctttaatttcagctgcataatctaaattgatcttatttgtttcacattctcgatgtaatattgcaccgtattgatcgtctccgtaaaccgtcatcagatacgttggtacacctaaattggctagattatgtgcaatattttgtccaacaccaccaacggataggttaacctcaccaggattagaatcacgttcaataaaatccttgcctggcatacctgcaatatccatattcaacccgccaacgactacaacatatttatcttccatttcgacacctccgtctctttatctcctgtatgcaaattcattataaaacgcttacaactatttgtaaacacttttttataaaataaacttttgtttatcaaaattgacctacagtagttaataacctatacttaagctacttactaattagatggggactggattagcatgacaaaacgcgaagaagaaattttaaaaataattaaagaaaatccattaatttcacaacaagaactggccgataaattcggtttaacaagatctggcgtcgctgcccatatttttaacctcaccaaaaaaggttacattgccggcaaaggttatattattaacgagccaaattttgtaaccgttattggtggcgttaatattgatatcctaggattaaccgatacaacacttattcaacaaaattctaatcctgggcatatcactttttctttaggtggagctggttataatattgcccataatttaacaaaacttgcagttccaaattattttattacggtttatggtgatgatctgaatgggcaaaaatttgaagaagatgctcaaaaaaatcatctcgctatccagcattcaaaaaaaatacctgataaaagtacatcttcttatctttacgtcaatgatccagatggcaccctgaatgtaggtgtcgatgacatgggaatttatgacgatatcacgcccgatttccttagtgaacgactagccacaatcaatacttccgcttactgtattattgatactaacctacctgaaaagacaatcgactggctatttgacaattgcaaagtacctatttttgttaaaactgtttcactcaataaaagttataaattacaaaacgtactttctaaaatagatacattaatgacaactgataaagaacttgcaatgctaactaactcatctgtgactgatgctaaaactgctgaaaaaagtgccaaaaagctactaaaaaaaggcatagaacatatttatgttctaatgcctcatactggattattttatattgataatcgaaacactaaattaatcgctggtattccaatcaagcgtgttaacaataatggcgccagtgccgcgttaacagccgcagtagttgatagccgcttaaacaacctaggttgggaaaaaacaacacagatcgcttacaccgctgccctaatttgtatggaaagcgccaaaagcgttaacccgttattgtcaaaagattatcttcttaaaaccgtaacccgttacttagaaagttagccaatcgtccgcaacgcatcttcaactagaccccagaatttagcatggtctaatttaacagcgactgatgtttggcaatcttcagggattggatagctgaaatcagcgacagtcatcccgcgcgtcaatgtcccgttgagttcaatatcaactgggacttttttagtagtcatgacggttggatcaatcacataggctaccgcacatggatcatgaactggaggagcatcgaagttttggcccttcttgtacatatcgcggaagaaggccaatagatcgacaacaaatgccgatgtttcagtatggatggccttaatttctgacacaatatcaggtgtcgctaaggcttgatgggttaagtctaggccaaccatcgtgacttgccagcccgcattgaagacaatcttagcggcttcaggatcaaacttaatattaaattcagcaacagcactcgcattagcttcgtggtaaccgccacccatgaggactacttctttaacccggtcgataatcttaggttctttgcgtgctgccatcgcaatattcgttaaagcaccagttggcaccaacgtaattgttttagctggatgactcataattaaatcgatgattaaatcgactgcatgaattttttcaagttcgacagtgggttttggcaaaacaacgccgtctagtccagattcaccgtggatatctgctgcaaccttaatttcttcaatcaaggggcgtgaacacccagcggcaattggcacatcatgcataccaatcattgtcgcaacagctaatgcattgcgtgttaccttagttaacgtttgattagcagcaactgtcgtaaccgctagcaaatcgatttcaggattcccgtgagcaagcatcattgcgactgcgtcatcatgcccaggatcacaatcgagaattattttcttcgtcattattaatacctccactttaaataactatcgtttacattatcactataacggtgaagcgcttacttgtcaaatcactattggatttcctaataaaaaatcagctaaatcacaagcaattaataacaagcatctaaaaaacagctcaccaaaattggtgaactgttttgcattaaacattaattaaaaaactttattattttgctgcacgtttaacgtatgtgccttcttgggtgttaatttctaagacttcatcagcactgatgaaatcaggcacactaaccactaagcctgtttccattgttgctggtttaccagaacctgtaactgttgcccctttaatagaaggttgtgtttcaacaacgcgtaagttaacagttgttggtaacgtaacaccgatgacttctgaaccgaagaattgaatcttgcagttcatgttttctaataggtatttcaattctgcttcaatggctgaagtttgaatttcatattgttcatatgtttcaagatccatgaagaaagccacgttatcttgtgtatataaatattgaacatctttagtgtcaatcattgcttgttcaactttaacttctgggcgcattgttgtttcaacaattgaaccagtccgtaagtcacgcaatttcacacgcataacagtattacccttacctggtttgtggtgatttgcttccaaaactttaattaatttgccgtcttgttcaaacgtcatacctgctctaagatttactgcttcaatcatattattaatctcctttgttaaaaaagtactcacttataactttaccaaatgaaagccgtttaatctagctaatctggtagtttaatttactcaatatctaatttttgaacagtttcacttgattttggcgtgtagtgctgatacatcttcgtcactggcaccgttggcaagcctttttgactcagataaatagttggttttaaatattttttgttagccggttgttttaattgataagtttcaatcttcaatggatttttaacttttccttgatcttgaccattaaattgaactttagaaagtggcaaactgatggttgcttgatctactttgaaataagcacggtcttgctgactccctaaatattgaactgactgattatctgtcttcttatagaagcgattaatctgtttcatactatgttggtcaacgagtttaacggttggttgatccgtcttaaataggttcagcccgtctaaatcagcccgaacactttgcgcactcatcattaaccagacaatcacgacaatactgataaaataaacaatgtgtaagcttaaactgctagcagcatgagataaattaaaagtatagcgatcttcaagttccttatccataacttggcgtttaatctggaaagcaattaatttatatgaaacataccagataatcaatgcgaccaccgttgagcctaaggccatcaagattgtcttattaagaatttccgaatccgtcattaacgggttaaaaccacttacgattttagcggtgacacttccgagaacgagaatgaccaccatttgtaaaacaaaaaaacgcgttctaatgcttttactgattgcggttggtgtaactgttgtcgtttgtttcttcatgcgtgtatcctcccttattaagctacctatattttagcataatcccccactcaaaggcgctaaaagtaaacgccataaattaaagaaagcactttccttctctgcttcttttcaatatgatacgcttgaactaatcaaatggaggtgtttctatgttatatccagatagtttaacgcagttactcacagattcaagtcagcctgttgtttcattattcattaacttagatacaggtggtcaagcacttagcgccaacaaaataaaactgaatagttatgctaaacagattcgtgaccaactacttgccgatcatcccgatcaagcaggccttttaaaacaagttgaagcctgcttatcgattgccccccaagaactcgctcatgtgcaatcaattgccttctatattactgagaataaatgctaccatctcattttgcattatccaattaatagcgaatactttacgattgatgcgcatccagatttacggccattaagttccgaactggccctcagtttaaatggcacgattttaaacctcaacaaaacgagcttcagtcttaaaaccattcaacaaaacgtgattcgcgactacccattaccagctgatgcgccaacaacgattgaaaaaggcattgggactgaccgtaaaggtgaagtggtccaaggcttctcaagtccaacccacagttacgtggtcaaggataatgaacaactcatcgatcaaaccaactatttccgcgtaattgatcgctatctcaccgaactactcccacaaaaggcccctatttatgtggtgaccttacctggtaatctcaatctcttcaaagaactcgcaacaaacgtgaattaccaattagaccaaaccattcagacctctccagaatcgttgacggatgatgaattactaaccaccttactaaaagatggccgtcacagcttacgtcaagaagctcttgctttagcagagcgagcaactaacacttaccacagcgatcccgaattggggaatcccgatattattttatcgcggatcaataatcgtcaattaaccgcactaattgtcccaaccgcactgacgccatcttcaaccattagcgctgatcagataccagttctcaacagcttattggttgccgcggttaaaaccggccttgcactctatcccgtaccggtcgaaaacctgccaactggcttaattgcacttggcttctaatcaatgtcttccctttacacgtgccaatacaacaacgtatattcaagcgttgtcgtactggtgcgtgttttttggttggcaaatacctgatccaaataagtgcttagcaatgcttgcggcacttccgcataataggcttctaaaaatgcccggtcaaaagtctcggttgtttgatattgaaacctttgttgccgcacttgatagccagcacttgttaacagtttgaccacagcgggaataatcgttggctcgatattaggattttcttcagcaatctcaaagtgttgttccagtggtgcaaataaatcatcggtattctgtgttaaccgtaaaaagccacaccactgtcgacttttttgcgtaatggtcagtagggtttcgtccgccgttaccgccggattgagcgccatccacactaaatcataactttgatctggggtttgttggctaaaatcagccaccgattgttgttgataagtcaccgatcgtggctttgctagcgcttggttttccacctgtgcataacgcaacatctgttctgagatatccacaattgtgtattgttgactattttgcgcgagcgctggtaggtacctgccgctaccaccgcctaaatcgacaacagaattggttggcaacaagcgctgttctactaaaaacttttcaatatcggtcacaatcggcacctgcgattccttttgaatttgatagtattccgccgcaaaatcatcccaaaattcagccacttcatccatgcacttagtcctctttcttctatataatagttgcatttagcttaccataattagaatgcaaaaaggcgttgagacaatgatcctttgtcccaacgccttttaatattctattaacggactactaatactggtaccggtgcgtatttagccatgtaggctgcttggctcccgaaatatttcgcgataccttctttggcttttgaaccaataatcaataaatcgggttggacctttggaatcacttctttaatgatcacttcgcctggttcaccttcagtgattactgctctgacgtttttgaccccttcagcccgcgcttgttcctgataatctaaaacatgtttttccaaatcattatattgaccgtggatataatctttattcaaagcctggtagacattcaactcatcattttccagcaccgatacaatgactaattctaaatcatccttaacggcccgtttaatcgcatattcaaaggctaatagcgcatctgctgaatcatccacgccgactaatacccgtctcatatttaaaattgacatcttaacccctcctcaaattattccgcagcttgagccgcgagttgctgttcaaatcgttgattacctttatataattcaacaatcatccagaccaatagggctaaaacagctgcgattaggacataggcgatatgatccgctaatgctaattgagccgctgttgcctgatcgccgaagaaagcttcgatttgaccaggtaagcccaacatatttaagtaagttaaaccaatgacggacaaccagcccaatacgcgaatcacgagtgagtttttgaaccgatcacccatttcaacccgactatcggtaaacatcaataacggtaacattgaaaatggtagggcaaaagctagaaaaacttgagaattattcatcaacgtattcaaagcttgatgttcttccaatggtggcttgttgctagtcatcgtgacacaaattaatacgggaatcactgataacaagcgtgttactaaccgccgtaaccaaagtggcatccgtaaatgaacgaaaccttccatgatcacttggccagttaaagtcccagtaatggttgagttttgaccagaagctaacaaggctactgcgaataaggtggatagaatcccagtccgcgcaacactggctaaaatcccgttgctcattgttgatgtgtcagataaagcttcaaataatccgaagaatgacggatctttgaccgcccccgttttgaagacggcaacgcccatgatcaacaagagcgcgttaacgaaaaaggccatcgtcaattgaatatttgaatcccatgttgaaaaacgaacggtttgcgcaacttgttcttcattgttgcgatcaatcttccgcgtttgtgaaatagcagaatggaggtagagattatgcggcatcactgtagcaccaataatacctaacgcccctgttagtggcgacatcccaccgacattgggcgtcgttgcgaatgttttagcagttggcactaacccaacaattacccctgcccaatcaggatttgatagcgcaacttcataagcaaagacaacaaaaatcacgacgattaacgccacaacaattgcttcaatttttctaaaaccaacttttgttaataataataatagcatgacatctaaaattgtaataaagaccgcgatcactaacggaatattaaacaacaagtacagcgcaattgccgccccaataacttccgcaatatcggttgccataatagctagttccgttaaaatccataacacgatccccaacgatttactggttcgcgctctgattgcttgtgccaagtccatttgagttacaatgcctaacttagccgccatatattgtaacaacatcgcgattaaactagacaccaaaatcacagacattaacaggtattggaaactctgaccacctgtaattgaagttgaccaattacctggatccatataccccactgccactaatgcacctggtcctgaataggccaacaatgttttccaaaatgttttgccctcaggtacttcaactgtcccattaatttcttccagagatggcccgttagcatattcaatcaacttatgctttttgggtcccttaactttattcatcacacacactccctttatttattccttgtaacacgtttattgtacaccgatttaatttaaagtaaataaaaagttagcaaagcctaactttttattatgcttaaccacattaaaaaagcagcccccactaaaggagactgcccgttattaatctttaatcatctaactcagtatcgaccacttcaccagtcgtggcatcgatctttacctgcatcttttggtgcttttgatggccttcaatttcccaataaacaacgccatcatctttttcaagggtcgcctctaagacgtcgccatcaaaatagtgttgggcttttttctgggcagcttcaagcgtcattaacgatttgaaatcaaaccgctctttttgacgagccacaccatgttgttcatcagtatctaaggtttctttcgttaaatggctgatatcacctgtttgactatcaatctgcatttctagttcttcagtatcactcaaacccgtcaagtgataaaccgttttgttcagttgcttttttagctgcaattctgaaatatccgcgtttggatactgctgtttaaacaactcacgtgccttttcaagactcactttcggttggagcttagttggtgtttgttgcttaaccgtggtcgcttttttagttgacgctgtttgcttagcttgttgatttgagcaacccactagcaacgcaatggttaataaaccgataagtaggggggattttttaatgatcaaacctcgctttactttagtatgcttaattataacatttttctaatcaaaaaaatggtttgccacctccgtgacaaaccatttgattagatttttttatggggattcacctgcaaaattaataaggttacaagtaaaaagacggctgataaaataattgtccgttcacccaatagtgagacacaaagaccggtcattactgcacctaatgtaaagctaataatgattcttataatttcccaagctttatcaagagcttgggtattctttttaaaaataccatcgtagagactttctgcaagtgttcggacgttcccagtcatcatcaatgaagtgaatggtcccccatttaattcccggaattcttgtaactgtgcggcggcaatcatcgacactgatgcgctcgccaacaagtctggaatatatggtgagattccggcaatcaccgttaaaacggcaatttcaacgcctaagatcaatcgttgccgcttattaatggaatcagcttccttgaaatgatgctgcacaacccgcgttaaaatcgttcccaacataaaagctaggataggggtaatgtgttgcattaataccgcccatttcatttgaccaatatgcgtccccaacaaaattaagttccccgtttgtaagccggcaaagacttgtctgtgtactaaaaaagtataggaatcaaagccccctgcggcagctaataacccaccgtatagtattttgtcgcttattgccatcttctctgtcatgaattcattcgactcctcaaattaactataagtattaactttatcggaaaatatgaaggtcgtctactacttcattcaaatttccaaaacaaaaacgctctcaatgagaaatctctcaaaaaaggcggtctaaacacatttagaccgcccttttatcctgctttaattttcggattcaccactgaaaccagctaactgacttgaatagattaagagtcttgtcgcgtaactaggatgatcattattttcagcaaccacgtcttttaaatcactcaagttatccgtgataatgccatcaacttcagtcagtaacaagcgttgcatcacgtctggatcattaactgtccatgcataaaccgcttggttgccggcatgtgcttgattgataaaagctgcattcaaggtcgtcgcctccattgtataagcattagccggtgtttctggaaaactgatgttatacggcaagataaaactaacaaataagcgcagtgcttgtttcttcaacaccgctacgactggatagctcaacgaatggatacgatcgccatttttcaatagccgttgctggtaacgtttgataaagttagtcatcatctgtgggctgtcttggggcgaaactttgatttcaaccaataatcgttggtgcgcctttttcgcagcagtcagatactggtcgaaacttggtatttttgctgaatagccattctcgcgaaccgttaatgtagtcaattcggctagtgttaactcatgaacggtccgattaacgccggctaattcttcgagattattatcatgcatcacgacaaattgatgatccttcgtctcttgaatatccatttcaatataatctggtttttcacgtgctgttttttgaagcgctggaatcgtattttgaacgccattgccgtcatcaacaccacggtgggaaatcaaagctggtctgttatccatcgcaccttctaaataagcataatcgtataaggcgacaccagcggcaactaaaatcaacaataacatcgctgcgccttgacgcattcgtattctcagtgaccgctgttttaaaatcactttaacgcgtgtttcactcggcaccagataacctgcctgttttaagatcagttgtaaaatcatcacaatactcatcgctaacaatatctgactgataatttctaggataaaaagatttaaaattgctaacaagagtgcataatgcggtaaattttgatcgtaatatcgttgtagattaaagaatagtagttgacttaaaactccgactagcgtaattgcaattgctagaaccccaaccttaattaatagacgccaaaaccgacctctcgtcgtttgccaacatttttgcaagagtcgagttgtcgataattttttattgaagattgtctccggtaaaaaagtgattaagcgaatcgacagaatcaatgctaacgtgtaaaccaaaatgatgggaccccaaatcttaggtgtggtccacatatcctgaatgataaatgctgggatggtaactttatttagtaaaacagatttaaaaataatctgcccaaacggtagaatcagcagaaaataaccaatcataatcagcattgttaagggcttcagagtcaataagtcatgcccggattgttttaaaagctgccactgtgatgctggcgtctgttcctgaattcgtttgatttgccggaataaaaaagccatttgaatatagactaacccgcaaatcaacagcaccagcaaaaccaagctaattaaaacgagcgggtgtttagtcaatactgaaacgaagttcgtgtaggtcagatatccaataccattaaccactaataaacggtttactccccacgtcagtcccggcacaattaaactcgtcaaaacaagattgatactcacaaccaataatacatagacgctccaatgccgtccgaatgcctgaaaattcgcttttaagaacctaaacaatcgtcgcaagccttaacctccccaaaaactactcattttagtttgttaccttaattattattagaaccagtataccagattcaaagtaccattcttcaatctagcgcttattagcaatgtctcacgtgaaacattgcgttgcaaaataaaagatgatccgccgataatagagggaccatcctttttttaatattaaattatttatgaatataagttaatgatctcgcgttagaaacggtttgtgtattaggaccagcaggactaccaaagcctaagccaccttgtgagattgtaacagtgttcttatccgcatcatatgattggacgtaggcaacatgcccatatgaaggatctgctgcccatgaaccaactttttggccagcagcaaagctaataattgtgccggcagctggattatgatcaactgtaaaaccagcggctgcagctgaggcgccccattggttcccattgccccaactattaccagcccatggcgcaacagctttaacataccaagtacattgtccccaagcgtaagcattacccgctgaactcgttgcttttttaccttcgccaacagaactatccgttcccttttcaccttcagcagctgaggcagctaattccttgagttctttttcagtttctgccttgtttgctttgtcgtaatccgctttcaaagcagttaatgcttttttattatcgttaatttttttcgttaagtcattttgattcttagttgccttgtcctttaagtctaacaagtttgttttttgcttttctaaatcagctttgtcagcttcaagtttagctttagctttttcttggttatccttcaaatcggttaacttcgctttagattcattaacatctgccaacgcttctttacttgcttcgtttaacttattaacggtaaatgtccgggccaccaaatccgttaggttgtctgaatttagaataaaatccacatagacgttgccactaacagcgtcgccacttgtcttttgaagtgagattaattggccttccaacacagttgtccgcttagccacttcttccttagctgcgtcaatcttagtcgaaagattgtcaatttcatcagttgcttctttaattgcagcttcttgagttgcaattttggcagaattatctttaatttgttgatctagcttaatgccctcttcgttagcggcagcaatctgttttaacagcgctttcgcgtcatcttgatttttttggatggcttctttagctgcggctgaagagctcgcaaaggccggttgcgttgatgcaattgttacccctaccaaacttactgtcactgcactaataatcgattttttgaatgtcattttattttctcctattatttaagcccgttatctaattatacccatattatatagagatttttgttacaattcaatgacttaaccattaacttaatttaacaagaatcaattgcccacaatgttatctatcaacactataatccttttatttaaaaaaatctcgtctattttaaattaaaaaatagctgtcagctccattattctagcattgaccaccaaattaccctaataatttgtttttaatttatgttgcatttacaataaaaatattttatactactattcaacaagagggaggcattattgtgaaagatattttaagaccgattggcgtcatcgctcgctcactagattcgattgctaatattgaattcaaaaaattcgatttaacccgtggccagtatctctatctcgttcgcattgcggaaaatccaggcatcattcaagagcgcctggtcgaactgattaaggttgaccgcgctactgtcactcgtgccattcaaaaattaagccgtgccgggttaattacccgccaagctgatgagaccaatctcaaaatcaaacatctctatttaaccccagccggccaagccatctatcccgagattaaacgggagaacgattattccaatcaggtagcgctgcaaggcctaacaacagcggaaacccaggtattacacgaactattaaccaaagtcagcaccaacgttgccgccgactgggaacaagtcaaaaaagggcaacagcggccctattaaaccataaaggagttttaccatgtcaattgaaaaagttacctcaaaacaacttaaagcattacaaacaatcagtattcaaaccttcaccgatacttttggtgctgataattcagagcaggatttagctgactatctagaatctgcctacagtgatacgcaacttagttcagaaatcgctaatcctaattcagccttctactttattaaacacaacggcaatatcgcgggataccttaaattaaacagtaacgatgcccaaaccgaaaatcctaatcctgattcaatggaagttgaacgcatctatatcctaccaacatttaaacgacttggtcttggcacacaactcatcgaatacgccatcaaaatggcgcaagaggcccataaagcccatatttggctcggcgtttgggaacacaacactgccgcactcgccttttataccaagttaggctttaagcaaattggcggtcatatcttccaactcggtgacgatgcgcaacgcgatttgattatgcaaaaggatttaaaccttcattaatattggttatctgttaacaaaaagaggcgacctatcaaggtcgcctctttttaattacttattctgatgagcacgttcgtattccgtatcacaatccgccgtaaaaatagcctctgtcccggcctcactggcttttgtgtaataccattctttatgatctagcttcgttaattctgcttgcagcgattcaatctcactggccaacatttgtcgccgttgttgaataagcgccaaacgttggtccaatgtttcatcgcctgcagttcgccaatcgatatattgcttaatgtccttcaactgcatgcccgtttttttcaagcattcaatatcacatagacaatccaagtctgcttgccgaaattcccgccgaccagccggactgcgtttaataaacggtaatagtccctgttcttcataataccgcagtgtcggaatacttaaatcatattgttgggcgacttcgccaattgataatgccatattaaccttccttacgcttgattaaaaatcaacgtcatctggcaccatgcattgaccgcctaagttttccaaagcactgatttgggtcatttcggcatctgttaattcaaagtcaaagatatcggtattttgcgccatacgttcttgatgggttgacttaggtaatggtaagacaccttgttgaatcccccaacgaagacaaacttgcgctgctgttttaccgtgcttcgtcgcaattgccgcaatcgtttcattagaaagggcacttgcttcgccaagtggtgcccaagcttcaactaagatgtcatgcgcttgattataacgcacagcttctgcttgtggccagcctggatgcacttcaatttgatcaaccattggtttaattacagcagtcttcatgatttcatctaaatgatggggcataaagttagaaacaccaattgcacgaattttaccttcattatatagatcttccatcgcacgccaagtttcagcgtttaattcggccgctttagctccaaattgtttggtatttgctggccaatgaatcaaatataaatctaaataatcaacacctaaggttgcaattgttttcgcaaatgcagccttagtagcgtcatagccacgttccgtattccataacttacttgtcacaaagatgtcttcacgagcaatatcactttctttcaaagcatccccgacaccttgttcgttaccataaacggcagctgtatcgatatggcgatagccaactgataaagcttctaagaccgcttttttcgtttcttcgttaggtgtttggtatgtgccataacctaatcctggaattgtaacaccgttgcttaaggccattggggccgttaaggcagataatttttgcatttaaaagtctcctttttctaatcgataagactactttacaacctcaagctgacttgaggtcaagcatttttacccgttaaatttaaattaactaccgtttagtaatgatctcttgtttcttctgaagactattttgaattaatgcttgataagtcttttggtgttgctttaaatacgctttaaaatacgccttcttagcacccgttaaccgtggttgatcagcaatcaattcacctgctagattaacttgaccactaccttgatactttagctgagcatcatttgacttcgaaaaggcgacggtaatatgctgactatctaaaacatcaacaacgtgtccatttcgtcgcgtgataatattcaccttacgttcttccaacggaattggattataaccagttggtaggatataagtgtaataggtcgtatcctccgtcttaagttcatacgcactattgttggcatatggactggtatctttatcaagatgccagccgtaatgcgttaaattctcccgataccgttgttccaattggtttaaacgtcggttactaatcaccaatcctaataaaataactgcaatcatcgtcaagacgattttataatacttgttcatgtgcatccgtttcgaaacttctttggtcatgacactgtcctcccgtaataatttatcaagagaaatagcaaataaatcactaatcgccacaatcgtttctaaatctggataatttcggccaacttcccaactcgaaactgttgaacgtgatacattcaacagctgtgctaagtattcttgggtccattcccgtttcaatctattttgtttgatttggtgaccaatgttcatactattcctcctgtcattacgagtatcattcacccctcactaattgcctagctattatctcacaccccgcttcaataaacgcgcgacattctctagcattcttatttatcgctctattttggcaaatctgtcatttcccaggaaataattaagagcaacttaacctaaaattaattagtctccttttcccttatttaataggccctccggtcttattaaatactcactagcatttctgtaagggttttacctttttgttttttttgattcgcggtataatatagacatccaaggtagttaatgaaagggagcgaatatcatgaagaaattcttattaggcagtcttgtacttgcaggaatcaccgtcaccggtgcttgcttagttgctaagaaaatggaactatttagagatgattcagttgattacgaaaagttcgaaagtcgttaatcgctattaatttctaaactgaatctaggaggtttttcatatgatcaagaaaaaagcaatcatgattggcgctggcctttcaaacatggccgcagcagtctatttaattcaagaaggcggttggtctggtgatgctattacattctactcattagatgaccatggttcaaacgatggtgcacctgtttccgaaacaaccgatgaatactggaacaagaatcatccactagaaaatactaagggctacgttgcccgtggtggccggatgcttaattaccggacttacgtcgatttaatggatcttttaggtcggattccttcagcaactgaacctaatatgacggctgaagaagatacccgttcattcgacgcgcaacaccgcacgttcgacaaggcccgtttattggaaggtagcaaaggtattttagatgctggtcacctcggcttcaataataaggatcggttattaatgaccaaattaattatgatgcccgactctgaagaagaaaaactagacaacgtttcaattgccgaatacttcaaggatgatccacatatgttccaaactaacttctggtacatgtgggaaacaacctttgctttcagaacacaaagttccgcacaagaattacgccggtatatgcaccaaatgatttatgaattcacacagattgaacacttagtcggtgttaaccggacacgttacaatcaatacgaaagtatcatgttacctcttattaactacttaaaagatcaaggttgtcgcatcattctcaaccgtcgaattactgatttagactttaaagagactaagatgactgatgaaataacggttactggtatgacgatgaccaatactgaaacagatgaagttgaacacatcacggttgatgacgatactgctgttatcttcacaaatggttcaatcactgattctgcgacacttggtgattacaacacaccagcccctgaaaatatggattacggtgctgctgctggcttgtggaaacaaattgcttctaaattctacaacctcggtaatgccgataaattcttcgctgaccgcaatgccagtgaatgggtcagctttactttaacgactaaaaaccatattttattaaacgaaatcgaacgcattaccactcaaattccagggaatgccttaaactcattcctatcaacgaaaccaatcacaccacttggtcaaaaagatgttaatatgtcgattgttgttcaccatcaacctcacttcacaactcaaaaaccaaacgaagcggttatctggggttacttcctctatccacgtcggagcggtgaattcgtggacaaaccttacatcgaaatgactggtaaggaaatgctacaagaattgattggtcaattagctaaggtcgaccctggtccaatcaatattcgcgaaaaggaagctgaaattatggacagtgttatcaacaacatccctgtctatatgccatatgcttcagcactcttcaacaatcgtgccaagacagatcgtccagaggtcatccctgaacattcaactaacttagccttcactggtgaatttgttgaacaaccttatcagatgattttcactgaacaaagtgccgttcgttctggtgaaattgcggcttaccactttgctgggattccaatggcgaaattagtcgacacaccacgttacgatcgtgatatcaagacattgatgcgcgctactaagaaaatgtttgaataattataaaaaaagagccgttcagattttaatctgaacggctcttttgagttactattgattaagcttcaatcaacgccatctcttctgtttcttggaattgttgcagttgtaataactgtgcttgattaatttcggtatacaacacaccagcaattgattggttaatataaccagcattgatgccttgttgcacgaaatcatactcatgttggaatgcttgaacgtataagatatctggcactgttgccgcactcttttgataatcatgtttgatgtgcgcacagaaatgattcatcgtacgacgaaccagataaacgaaatcattatcgctatgcttttgcttcaagcgattttctagaaccgtatcgagataatgatcaatcgtatctgtcacttcattattaagtgctaataaatcatcccgcatcacttcgcgttgtttaatctgttctgacaattcagggttttcggcaattcgcgcatcccggaaacggcgttgttgttcatgcgtaatcacgcgatgacttgtatgccacaatacttcctttttccaatgcttaattgaatgtttcattcgcaaggtaaagtgattacgttttggttcgaccagtacgcgtcgtaatattttgtcataaatattaacgatttctggactataacgattattaacgtcctcgcaatgaaggaagttatccaccacttccttagtctcactcaacaacgcattataatttgccgtcgactccgcgcgatccactgttaatcgattgctcttttgtgattggagctgatccgttagtgcttcgcgaacggcatgatcttcaatttgagaacgcatttgtaaaataacgtaatcgaccatcttattgcggatatgatccaaatcggccattgtataagcttccgttttttgtggcaacatacgtggcaacacaatcgagctgaccaccatactgattaaaataacgaaagtcgcgatcgcaattaattcgtcccgatatggaaaggcgtgccctgcaatcttattcggtagtgaaaaggccatcgctaacgtcactgtaccgtgaatcccactgactgcgaataaccgggcaaaaaatggccgctcatcactttttcgatcaccaaagaaagctgaaattgaagcactatccccacgtaatgcccaaacatagcgcacaatccacatgacaacgtagactaaaacactgacccctaataaggcggcagcaccctgccaacccatttgcgtcacatttcgagcaacttctggtaacgaaatccctaaaattaagaaaacaaagtcattgagaatatccgctagaatattccaaattgttcgtgaagtgagttgaacgttagttgatgttaatcgtaaacgatcagcttcccagttatgttcaatcccggttgcgaccaccgctaagattccggaaacgccaaaatgttctgctaataagtaaatcgcaaatggcgtcaataaactaatcggaatcgtcgttaattccggatttttaccatgtcgattcaagttaaagcgaagcattaccaataagaccccaccaacagctacgaataggaaatgaccaatcccttcaacaaccgagaacgtcccttttgagagcactgacaaagcaaggtccagcatcactaacccggtcgcatcattaaatagcgattcaagttcgagtgcttcaccgacacctttgggcatatcattgttaccggtcattgatttgaccgcgactgcatcggtcggtgtgacgattgcggccagcgcaagcgccgggcctcgatttgcttggtcataacgccaactaccactgccgtaacaacagctaagacaactgagagtaagaaaatgccctgaaatctcttccgaatgttagcaaacgactgcttttgcccatcgataaacatcaacggcgcaatgatcagtaacatgaaaaattcgggttccaactgaaaattgtggaacactggcataaacgataggccccaacccatcgcaattaataaaaaggcttctggtatccgtggtacaagttgcttaaccacgttgaccacgatgacgccgactaacagtagcgccactaggtaaaattcattcatattataatcttcaatagctaataaatattgatatattatgcactaaattgttgctcttttctactattataacccaaaaccaaaaacagagtagtgtccaattgattcggacgctactctgtttttggaagagctaaaataatcagttaatgacgcacgcttttttaaacgtgctttcattaacagcttcttccgcttagcgctatgccgcaaacgaacgacactatcgttcattcacgtcattgtgctaatgctcggaagctgaccgttaatgacacactctagtcttgattaaattgtgtctccacatattctcgatagagttcatggttagcaactaattcttgatgtttacccgcacctgaaacgtgtccgttttcgatgaagtaaatctgatctgcatcgacaattgtacttaaacggtgcgcaatgacgagggtcgttcgaccttccatcaaggtttctaaagctttttgaaccattgcttctgattcagaatctaagctggccgttgcttcatctagcatcaaaatcttaggatcgcgtaaaaaggcgcgcgcaattgccaatctttgccgctgaccacccgaaactttaacaccccgagtaccgacttctgtatcaaggccttcaggcatctcacgcacaaacttttcagcaaaggctaattgtaatacagcccataattgtgcatccgcgtattcaccggttaacccataagttaagttatctcgaatcgttcccgccataatcgctgaatcttgactaacaaaaccgatttgtttccgccaatctgctaaggaaacatcgttaattgacgtttcgccaatcttgattgcaccctgatttggttcgtaataccgttctaataagctgaagattgtcgattttccgccaccggaagggcctgcaaaagcgactaccgtattaggtttcgcttcaaatgataaatcatgtaaaatcgtttgatcatcgtcgtaaccaaaatcaactgattcaactttcaacgtttggtcttcgacatcgaccgccattccttgatcaaagtcttcttcggcttcttgcatcaattcttgaatccgttctgtcgagccactagcttttgagagcgttgtaaagaattgccctagtgttgcggctggccccattaattggaataagtacattaaaaatgagaacatcgcaccaatcgtcatggtgccttgggcaactcgcgctgacccataggccaaaataccaacaattaagcccatcatgacagcggtcataatcggacccgcgacagaatcataaatggcttctcgtaaaccaatcttataaaggctgccaatagcagtttgcccttgttggctagcttgttgttccgcatttgatgatttgactaagcgaatttcgctcagtgtttcatccgtttcgccattgaaacgagctaactcatcttgacgcgtgtggccaatagcgtgtgacttcttcgcaatcggtaacatcacggccatgaccaatggcactgaaaaggccataattaaagtcattttccaatccatgaagagcataatagcgaacgcccccacaattgtgaaaatggctgttactaacccgggaaatgatcgtgataataaatctttaatctgggttgaatcattcaccaaccgtgatgtcatttcgcccgacttcacgtcatcaaaataactcactctaagatgcaataatttatgccaaatgttattccgtaatttctggataacatcttccccgaaaaagccgagtagtgatcccgaagcggcactgatcaccgcacttaagatgaataaaacaacaatcccaatcaacatgtaaatattaaattgttttgaaaaactattgatcaattgtttagcgtaactaggaaccgctaactgaacaccagttgcaactagccctaatgctaaacccaagaacaactgccaatatttaggttttgtattcttaattaaacctagaaaatctttgaaactaaattgacttttagatggtgcgactctcatttgttgcataataataacctcctaccaagggaatcgtgaacgattccaatcgccgtgattttgatgatgcatatggtgcccgtgttcgaaaaaggctgaatcaaactgtgtttgttgcacattattggcaattttagttaagagcacccgtaattcattgatttcagattcacttagtccagctaaaatcgtttctgataacttgtcagtttctaaatcacctttttcaattgagtcccgccctttatcggtaataaaaatgagggaaacccgcttatcggctgctgatgcttggcgtgtaacatagccatcttcttcaagtgccttgacttgcaaactcactgaactgggacggatatctagtaattctgtaatttcagcattcgttaggccatctttagcggccaatagatttaataatcgtgatttcccctttgtattcataaaatcacgccgtctttctttgccgaccgtcatccatgccgatgccacaaaataccgtgattgaacgagtttggcgaacaacgccataatttcttgtgtttcatttgtcatattgatcactgctttcataattagttagtttttatatcggttaacctaacgaaaatcagtttaacgcgttagttaggttgtgccaataaaaacctaacaattaattttaaaaaaagttggcacagtataaactgccccaacttcagtgattattaatcagctctatttttttcaaccgctcttaattcttcttccgtaactgccatatgatcttcatagtgatcaaccttccagcgcagatggtcaattgccgtttgaagatcatcgcgcttttcttccataattgcgatttgttcgttcaataatttaaattgttgcgttgtattatcttcttgcgcatcaaataagcgaatatattccttaagcgcttcgatactcatcccagctgcacgcattgtctttacgaaattaattcttctaataattcggtcgtcaatcgcccgtacaccaacatcattgcgatcaattgccgggattaagccctctttttcgtaatagcgaatggttgtcgcggtgacacctgtttgttgactcgcttctttaatattcatctcacgtaactcctttattatggccggttaatgccgacacttgttcgtgcatataattgctcgtcctcaagcacccgccggactaaatcagcgattgcccaacgagagacatcatggccgccaaaagggtcattgcgaccagttacttcataatcatggctgccttgatcaaaccaaccaggtcgaatcacagtataattcaaagtactctccgtgacaatatccgcggcttgacggtaagcttgtaacatcccgttagatgccagattgcccgaagcaccaatactagctggaatttcattataaatccccatggaagcaatgaaaaccagtttatgaatctgtaatttagtcatcgttgtcacgactgccttggctacttgagctaattgtccactgaccgccacaaaaacagcatcttgattacgcattactttttcgagttgtgcgagattggtcgcatctccttgaacccacgtgacgcgttcttgattaggttggttaacgtggcgcgctaataaagtaagttgcgcatccgtttcagctaataaatgtgtggtaacttctgaaccaattgaacctgttgcaccaataattaagatttttttcatcattaagactcctttttaagtgttggtaaaattaagccgatcactgcaagcaacgcaccaatcaagagaacggtcgctaaccccattgcaacgtggtaacttgttagaccgtttttaaaagtcgctgaagcagccacgataaacgacatcccgattgaacccccaggaccatgttgaccacgcccgaagctgcaccggcatctgcaggtaacgtattggcaacaccggcgaccgttaatggactgagtgttaaaccttgtccaatccccatcaggatcatgggaaccgcaatacctagcgcatagccaacttgttccgagaaaaagcctaaggcacccatcccaattgcggtcgttgcaatccccacgattagtaatttcgtattaccaaagcgcgttgttaattttgaaacctgcaaggcaacgatgaaattaaccaccgttaaggggaaaaagccaattcctgcttgaaggggcgtaaaacctaaatgggtttgcataatttgaggtgtcaaaaaccacatactcaacattgcacccagatagaagaagcgcgcaatatagccccctagtcgttcgcgatcagcaaacaagcgcaatggcatcattggttgtttcgttcgtgcttcttgccagataaaagcggcaatcgcaacgactgctactaacaatgctagtaagcggccttgttggccaactaggctataaacaagtgccgtcatcccaataatcgacgtcagtgcaccgattaaatctaatcgcttagcttgtgtggcttgtgtggttggtataaaaaggaccgttaaaccaatcataataatcgcaatcggtacgttgatgaaaaagccgtcccgccaagatagtagactggcaaaaataccacctataactaacccaatactagcaccaataccagctgtggcaccataagccgcaatcgcgcgtgttcttgcttcacctgaaaaactgtccattaagagtgccaaagtcgttggtgccaagattgctgaaccaatgccttgaaatgcccgggctaaaataatcatcaccgcactattggcaaggccaactaataatgaccctaccgcgaaaactgtcagtccaatcatgaaaacccgcttacggccaataatatcaccaatactgccgccaagtaataacaaaccaccaaacgttagtgagtaagcatttgtgacccacgataatgtcgtttgacttaagtttaattcggcggcaattttaaccgtccctgtaaaaataattgaattatccaataaaatcataaaataactgatgaggataatcgctaaaataaccttcttgtttgtctttttcattttaataacttccatttcgtttaatctctaatcaacaaaatgaagtatagaccttaaagtgcacttcaagacaagagctattttgaaaaaatttatcccgcaaaaaagccaccccaacaaaccgatatttgttagggcggcttttcatcacgctatgctactaaatttgttgtgcaattgccacattaaccttttctttttcactttcaatcaaggccacgcgactttcgatgaccttaatgtccatcgttatttcccgggttaagcctggggtatctaatttaggttcgaagaaggctttgaattccgctaaacgttctggcgtcttgaagactgccgcgattgatgtgatataagttgtaaattccatatcgccaccgactgtgtcttctagccattgccaatcattgcgaatccaatcccaagtggcttgttgactcgcatcgttagcgagtaaaccccggaaccaagcccgtaaatcttgcggtttaattgtcccggcatcttcaaatttactaattaaagtgatgattaattcaggatcagtcgtccgtgttaaggcagcactcaagtcgttcttatagctggcatcgctagtttgacgataagcttctaagagttgactataaagcgcggcgttaccaaagttttgcacttcattcatcaagactagtacccgaatagcagctggtaaagttgccaactgatcttggttagcttggaataatgcgtgcgccgcatcaatcgctgcttggttcttagcatacaaggctgcacttaaaactgtcggccgcatcaattgatcatcattggtatccgttggttgaaccgtccaacctaagcgtgccacttgtgctttactcaatttatcgaagaaagtccgcaagtgttgttcacttgtttcaccggctgtgacaaacttcttcaaattaccagccactgtataaagtgcatcagccactaagttagaattacttttagcaaatggtgctagaactggaacgacatcggcgtaattaatttgccgtccttcagccaataaacgtaaatcttgtagtaattgaagttgcgcgattggtgccatttcagcactatcttttaaaatatcgtcgaataacgtttgatcatagttaacgatgaaatgtgattcgttccccacatttaaacggaatggttgcccattatcggcacgtaactgcgcgtaatcgccaagcactaatttgcggtcagtcatcaacaatggtgtagccgcgtagttgctcttcaatggaatttgccattgccggccaacctcttgcccttcgccaatgaagaattgttgttgactaagtgttaattgtccgtcaacgactttcgctgttaccactggataacctggttgttcgagccatgaatccataatagcaccgacgtctaagttagcggctttaccaagtgcggcccataagtcagcccctgttgcattcccgaattggtgggctgcaaagtaagccttcaaacctgcgcgtaatgcatcgtcgccaattaaagtgcggaccatcacgagcatccgtgcacctttagcataaacaatcgcgccatcaaataaggcgtcgatttcagcaggattattaacttgcacgtggactgattgaacaccatcagttgcatccctttgtaaagcggatgatgcttctgaggtttggaaactttcccaaatgtgccaatcaggttcaagtgcatcgatggcgacgtattccatcatattagcaaaactttcgtttaaccagagatcatcccaccattgcattgtcactaaatcgccgaaccattggtgcgccaattcgtgagcaatcacggttgctacacggtgtttcgtcgttagcgccgtattatctggatcgagcaataagtaagcttctcgataagtgactaagccccagttttccattgcaccggctgaaaagtcaggtaaggccaactgccatgaatgtgggagtggatatggtgtttggtagaaatcttcgaagaattcgattgaacgtttggcaatatccaatgcaaattcgagttcgttggcttgatgcgctttagtggcaaaaacgcccacttgaacgccactcttcgtcttcgtttgtgcgccttggagttcaccgaaggcaaacgccacaagatacgttgacatccgaactgtcgtttcaaaatgatgaacgccatcgataacttctttttcaggcatgttgctgaggattgtttcgccttcgtgttcgtcaaatttaatcgctaaatcaaaagtggctttggcttctggttcatcgacacatggaaaggcttggcgcgcaaagttggtttcaaattgcgtcccaatcaattctttttgcaccccatcgacttgataataagaaggatagatgcccatcatcgaatccgttaaaatagcagtatatgaaatgaccaatgtcacttcgcctggttggcccacttcgaccttcaaggcattcgcgtcattatcaactgtaaatggcacgctcttccccgcagcacttaccgtttcaatcaccaaaccattttgatgaattaagaccaccgcatccttggccgtccccgtaattgtcgtccgaccactaaatcgtttttgagcccgattaatatctaaaaaaacttgataatgttccggttgaaagctttgataaaaacgcatcaattctgccatattatgatctccaatttcatttagaatactgttattatacgacttttcatttcaaaaagctgttgtcatccatttcacattttgattaccaacctggttgtacttaatctaaaaaatcaccttaatcttaaaaaacagattaaggtgattttttattaattctcagtagctaaataccactttgaaacgtgctcgcctaagcaatgccttgcgtttagctacatcagtcaaataactgactaaatcagttattcgcctgcttaggctaatcctcacgcattacccacttagtcgaacactcttttaaacttgttgtttagctgggcgaatcaagacttcactgactaccacatgttttggttggtcaatcgcatataagactgcattagcaatgtcttctggattgagggccaacgctgattcttctggggcatccattaattgcttaacgccttcgaaaacagcggtgttgccaattgtattgaccaattctgttttaacagcacctggtgagacaatcgttgagcggatgccgttatctttttcttcttggcgtaacccttccataatggcgcgtacagcatattttgtcccgttataaacggcagaagctggataaacgacatgtccggcaaccgaatcagttgagataatcaacccatcttgttgggcttgcatcgttggtaaaaccgcaccgatcccgtttaaaacacccatgatattgatatcgagcatcttttgccattgatcgtaatcgcgttcgctcagatttccttggggcatgacgccagcattgttatataagacatctacgcgaccgaaccgatcgagtgctaattggactaagcttgccatctggtctcgattagtgacatcagtggcttggtaaattgcattttccccgatttctgccactaaggcttggagccgatccttgcgacgagcggccaaaacaaccttagcccctttgcttgctaataatttggcagttgctgctccgatacctgatgaggcacctgtaatgataacgactttattttgaattgacatgttaaaactccttttctgctttaatttgacgaatgacttttgccggtgtgccggcgacaatcatattagctggtacatctttggtgacagttgcattggcagccacaatcgcattttcgccgactgtcacaccggggagaattgttgcccccgcgccaatccatgcgttctgtttgatatgaactggtttaacgaataacccacgccgatcggctggattttccaaatgattcacggtaattaatgaggcgcgcggcccaatcaacacgtgatcatcaatcgtaatcccacctaaatcaacgaatagaacattattattaataaaaatctctttaccaaaggtaatgtgtttagcgtagtccgtataaaagggtaatgacactgtcactggttcatctatttcttgatccgtaatacactttaaatacgcccgtacttcggctgcatcgtgatagcctgtattcatttccatcactaatcgctcattattgcctttgaccaaatgaatttctttaaacaactccgaatcacggtaaatcggttgattcgcaattctcgttcgcaatgagtagtccaccttgattacctccttttagtgcgcttctttacttgctgttttcagtatacttcgctaaactaacaatgactaatactcatatcgaatagctagctataacttttatcaataggagaagtattatggatttacgtgttttaaattactttttaaccgttgcccaggagaaaacaatcagtaaggctgctgaggtcctccacttatcacagcccacgctctctaaacaacttaaggacttggaggttgaattaggcgttcaactcttcacccgtggcaatcgcgaaatcacattaacaaccgatggcatttacctgcaaaaacgcggacgcgaaatcttatctttagttgatacaacgacaaataacttaacgcataatcaggtcgtcagtgggaccatcagcattggcgccggtgaaacgcaggcctttcaactaatcgcgatgattatcaatgatttacgacaacgctaccctgatatcactctgcaattattcagcggcactgccgatgaggtcaaagaacggattgatcaaggtttgctcgattttggtctcgttattgatcctgtcgataagcagcgctatgaattcgtccgcttacccgtatcagatcattggggcgtactagttgccgacgaccatccaattgcggcgcactcgaccgttgatgcagcaaccttggcgcaatatcccttattaatttcgggacaatcactcgttcgtcaacaaattagtaattggtttggcgctaaccttgatcaacttgatattatcgggacctacacgcttttatataacgcctcattattggtcaaaaccagtaacagcgccgcattgtgcatcgacggcattatcaatactaaggacaacggcttaaaattcgttccgtttaatccgccactaaccgtcaatacgaacattatctggaaaaaaggccaagtcttctcgagtgctggtcaggtttttaaagaagccctcacagatcagacaaacaaaaagccgtcacattaactgtgacggctttttcaatatgcactttatttgcagaatttcttaatttatgtccgttgctttccctaaatacgggctctataatgcatattgaatcttatctggaggtcttttgatgatggaaaaaaactgaaaaaatcgcaattttagaaaaactggtctcaattgatacaacagaccaagcagaaggtgtgattgccgactacttagccgatctattcacacaacacggtatccagactgaaaaagtggcttctaaaccaggccgcgaaaacttagttgcctatctaggtgaagcaaccgacaaagtcctcggcgtgactggtcatatggacgtcgtcagcatcggcgatcgcagcaaatggacgagtgatcccttcaccctaaccgctcgcgatggtaaactcttcggtcggggtgctactgacatgaaatctggactggccgctcttgtgattgcaatgatcgaattacacgatcaaaacgtcccattaaacggtcaaatcaaactccttgcaacagtcgatgaagaaaagaacgaaactggtgcccaaactttaactgcacaaggttatgccgataatttgacagccttattagttgccgaaccatctggcgttgataagcaagccttagcaaacagcaccgacaaatttcccacagaaatggtccaaaaattactcgcagctaatcaaaccaatgaacaacattttctgattttcgcccacaacggttcccttgattttaaagtgactgcaactggtaaaacagcccacagttcaatgcctgaactcggtattaacgcaattgatcatttgctcgcctactataatcgtcaaaaacaatacttcgatcaaaagcatcccatcgatgatgtcctcggcgatattgttcccgtcacaaccttaatcaatggtggtgaacaaattaattcggtccccggtcacgcagaactcacttgccgcgttcgcacgacccccgcattaactggcgaccaagtcattgccgatctcaatgccattattgctgaacttaaccaacaaacagacatgaatttagcattaactgtcattaataaacaaccaccggttaaaagtaatccacaggcaccattcattcaaagtgttcaaaaaatcggcgcacaaaagttatcccaagcttatccactgatgcacgttgctggtggtactgatgccgcccactttgctaagaataaccccaacttaccagtggcagttgtcggccccggcaatgataccagtcatatgatcgacgaatacgttgacgaagaaatgtacctcaaacacatcgacttctttaaagcagtcatgacggattatttaaaatagatagattgcaaatttgatctaaattttttaataaattagtcaacataatctggtaatatcgcctcggttaagcgcttcaatcaaagttcggttaattctgagtaacatagtcgtcatattttgagcactaatgtactttaacctattctatttaagtattggacagttctagctcacaaaaaatttcgattttaattcgttcagaataacttacactaaacaaaagaatcaattcctaaaaatatgtctgtgataaacactatgtgatacttacactgccatctggtatgtgctgctaaactactatcgtcttttacttgagacatgataaaaatccctttcgcttttagatttggttggtagccattctctatagcgaaagggatttttaatgctgaagctaattctaactcccgcacctaaaaggtgtggtttattttttcctaaaaaaatgaaactaggcggcacatcgccgataaaatatcgacaatgtgccacctagaaaagacaactaactatttactttaacttttggggtatttgttacccatactaacgtttctatttatttggtaaaaacatctgtcataattttaatttatatatttatcttcaccagcaaagaatccaaatccccctaataaaatagcagtcacaattaaaataattaatgatacattccaattatgagtcatatcatgcataaagccaaagagagttgggccaattgcagctaacaagtaaccaattgattgagccatgcctgatagttctgccccttctcttgcatttcttgtttttaggttaaaaaacatcattgatagtccaaatgcacagccaccactgatcccaataaaagcaattcctataataataataatagtattatttataaaaagcccactaattcctaaacacattaggattgatgtgtttatggcaattttactctgtcttttgaccctcccagcaataattggaattataaatgtaaatggtaataaaaataattgcatcattgacaataaataaccagcttgttctgcagtgaatcccttttgaataagcatttcaggtaaccacgcgactaacacgtagaatactagtgactgtaggcccataaatatagtaacttgccacgcagtttttgaatgccaaatactattctctataggtaattcctctatcttatctggtttatcatgtcttttcaattgtggaatccatgcgatacaagcaattaaagccaaaataagccaaatcctaagtgaattattccaacctagatttagattattagctaatggaaaactaactccagatgcaattgccccacataaattcatactaattgaataaataccagtaattaggcctaagcgatgattaaattctctttttattaaacttggaattaatacgttacacatggcaattgcactacctactaaaatagttccaaataataaagtgcttgtttggggaattgatctaataaataaccctataactaatacgattgtagaataaccaatagtatattctagactcaatttttcagctattttgggtgccactggtgataaaatagcaaaagccaataacggaattgtcgttaaaaatcccgcaatagttccagaaataccaatattgtccttaattaaacctgttaaagggccaactgcagttaatggtgctcttaaatttgttgcgacaaatataattcctagaagtaatacagttacctctacactcttctcttgtactctctctctcatatgaaccctccaaaatatgcaattatatattatagtatataattgcatattacattataggttctcatattttacaactatgttcatcaaaatatcttcattagtatcattaatatactcatgcgaattattatttatgaagtaaattgtattgtgttcatgaacaatataactatcatgctcaactctaagatttaatgtccctgatagtacagttatcacctctaaagtattagaagtctggctatctagataatacttactattagcttttagccgaactttatatacctcgaaatcaaattgacctacaattggttcgacttcccacttgtgattttcatcttctaaaaaataaccatgattttcagttgaaaaaacgacattacttcctctatttttaaatagagacattagtggggcttctagacattttgttaacttccataaagtatttattgttggattcgattttccattctctatctttgttatagttagtgaacttagtcctgataattctgataatttttctacacttatttttttactttgccttaattgtttaatttgttctccgatattattaactatattattatttgaactcatagtaattatccccgttatattaatttttggctaaaatgcttaactaagctccttagtttatatatattatactctgttatatttataatagacatttttataataaaatatatattcttataaattagttagcaatagtcctattaggtaggattattgctgatccaataccttccccaaaaagctactagcattaaaagagactgctttaagttttttctgctcgaattaattacgcgcgttttataatcaagttagccaaatacttttagctaattgataaaataaaaaacaccaagacaaatctctgttatcattgatgttcctacacaaacaatgaaagaggttattgtcttgatgcaagaacagaataccacagtcagaaaaaaaggtcagcacctaacttcgtttgaacgaggcagaattgctacgctgcacagccaaggctattccaatcgtgcaattgccagagcgcttaatgtttgtcatcaaacaatcaataatgaattgtgccgcggcgagatcgaccaagtaaaaaaagtgaatggtcaacgccaatattacgctgtatactcaccagaaacagcacaagctaagtacgaagctaatcgagcccactgtcatcgacctttgaaattcgtcggtgtcgctgattttatcgactattttacgactcatttgcgtcaagatggttggtcgcctgatgcagcagtaggacgggccaaacttgaaggcttatatcaacctgaggagatggtctcgaccaagacgctataccactatattgatgcccagttacttgaagtccgtaatcttgatctactcgaaaaaacgcgccaccgtgctaaatatcatcactcgatcaagcacaagcgtctggccggacggagtattgatgaacggcctaaaagtatcgaccagcgccaagagttcggccatttcgaattggacaccgtggtgggcaagcgcaacggtcaagagagtgtgatcttaacgctgatcgagcgtcaatcccgctgccaaattctacgtttgatcgatggtcgtgatgccgattcagtcaactatgagctggccaagatctgtcaagaatacggatcaatcatgaagtcagttactgccgataatggcgctgagttctcggaagttggcgctgtacttaccggtgtcgctaacctttattatgcccatccatatcgttcctctgagcgtgggactaacgaagcgcataatcgaatgatccgccgcgatgtacccaagggtctatccatggatattttgggtcctcatgatatccaagcagttgagtcaaagctaaacaatttaccgcgccggcaaactggctatcaaacacccaaagagcttttctccgctgcttccgccggttaagttaagtccataaaatatgaatattaatgaaaatactgatttaataggatttatcgtgtggctaatttgttcttgcaatttgggctcgaattaattttagaacttactactaaataaaaaaggatgacagcaaagtaccttcgccgtcatcctttttaaatgtttatttatgctaatgtggcatctagttttgtcgctaatgcttctttacgttgcaacccaactagttgttcttgtaattgaccgtctttcatgattaataaggttggaatggcttgaatgccaaattgcgctgccaaattttgattttgatcaacatcaactttggcaattttagcctttcctgcataatcatctgctagctgttcaacaattggtccttgcatcttacatgatggacaccacgttgcccaaaaatcgactagtgtgaccccttctttaatctcatcgttaaaattggcttcatttaaaatttgtgctgtcatcacaatcgccttcctcttcaaaagttaatcaacgtttccgttgaattgatactcataatatatcatcttactttttgtaagtcaactttaggaactcatcaactgattccattcccacaccgattgattaaaggtcgccactttgaaacccgcatcatgcaacgcctgactagcgacattggcataagcacatagccgaccgcgacagtagacaacaatttccttatcttgcggtaattcggctaaatgttgtggtaactcatcatatgggatattatgcgctcccggcaagtgttgcgtctcatactcatcattgggtctaagatcaactaagtacgttgattcagcggttaatttcgcttttaacgccgaaatcgttaacgcctgtggtgaaccagtttgttgcttgaacgttgtctgaatggctgccaattcaggctgtgactgttctgcgaccgtgactaataacgatataagctgcttaatctgatctgacgttaagcggtaggttacaaaatttttatgtcgttcaatttcaaccaagcgcgccttcttcaaaatctgtaaattgcgtgacgttgtcgcaacgcttaacccaatcgtattggctaaattttcaaccgttttgggaccctgcaccaataaatctagtatccgcaagcgcgtcacattccctaatgatttccctaccttgacgacttgctcataaacggcatctcgatattgtaatatctgttcttccactatccatccctcccgataatcaatgattttattgaatagcattaacttaacacgttcatttgtaacggtcaactggattagtccaaaaaaataagcgaccgctattccgcagtcgcctatttccagtctattcttattgttgttcaagaaaactacgacccaaagttggaaccgccgtgctttgacggtgctcttcccattcggtaatatcgcgattaaccttcttgtagatcttgcgaccttcatcggtaattgtaatgttgactaagcgttggtcctggcgttcgccacgtagcttttcaatcatttttttgtcttgcaagacatttaacttacgggtcacaatcggactcgatattttaaataccattgccaactcactcggtgattgggtaccttccataacaagtctttctaagtataaaaattgttctaaactaatatcgtgtttatggcaaatcgcattcaagttagatgacactgatcggtattcaatataccactggctcaaataatccatgtcgccacttcctcccaagttaaactatcgatgaatttaattcatctatgtatgtgtaacgagctaatattagctcgttgcacctaaatacttatttaccagtttccaatgtccatgttaatgatgtcttgtagattgcatttgcaactgcagcatctgttggcataactaattggatatcttctggtgcccatgcgaagacgttagcacctgtacctgtatcagtatctgctttaccaactactgtaccggctgcagtacccaacttacttgttggtgctgctagtgataatgagaatgtatctgtgattgcatctttagcagtttcattgattgcaacatccccagctgatggtgctggcgctggatcgccatcatcaccgtcggctttaggagtagccggtggtgttgcgatacttgctttataatcagcaagatctttcgcaaaagtcttatcttgatctgagtttgttagttcataaacaccagatgtcaatgcatatttagtatgtttgaataagaggttagcaccatcaatttcttgaccacttgtcgttttcaatggttcagcagttgatacttttaaatcccaatccccagctttttgagttgtggcagcatccatgccgtctgcatgttgacgtgtcacttgtttatcaacaactgtgacccaagcatcattggcaacatctttaagcgctgtatcactacctgcatttaaaagcggtgttttgctagcaactgagttgtcatatgacgcatgttggttattcttatcattggcgtagtttttaccatcgactgtgaatgttgtgaatgctttgtcaaaagttgcgtggttaccaaaatctaaggcctttggcactttttgtaaacgtaagaaaccagtgttaccgttgtcgatgttatcaccgaatgaaacgccaacttctgatttatcagtttgtgctaatggtgtcccaccattatcgatcacgccaccttcatgagttgcagcgaaggttgttgtcgctggagccaaaatgcttaatactgttgcgccggctaatgcagcacttgttaatttcgtaaatttcatatgaaattcctccctagaattcatatagatgcgatgcaagcaccgcgtttttttatagcttaatcttgcgattaagattataaacaaagttagttagtttgcctaatcagcaattgattttcccacaaaccaattactgccagacgtcgttttcaaaatgacactatgattgataaccattagtgattcggccagcgcaatcagtctttatagtgattactaattcatcgtaatcgttgtgaaactattgaagtcttggtaaacccgaattgcaaagtattacatcatcagtaattgtagtcgcaacaccaccgaccgtacgtgtatattctaaagtctgcttcaaaatagttccttgtgcttctaatgatgatgccgtaacttttattgttccacttgttccaatcgcattatcagcctctaagccaaaaagtaaagttgtcgaggaacttaaatttgtaaaactcaaatcagcttgattgggggcaatcggtgtacctgcaccaagatcaatatcaaatttatttacatcatctttatgaattgacatccaacgtgtgtattgtccaaaatctttcgcaccttgtgcccataaaccaatattattccgtccagcgtgttccatcaaggtcttagtaattggtaccccttgaactttacccgctacaaaattagcataggaaatcgactgatcagtgatagtcggtgtcttacctcgaatcccatcatagttcgtcccatttgtataggctaagtagttcccaccaccaagtgctaacttaccttgatggaatgttagtccagtatcatcagccgccgacaatgatgcactttgcatgaccgacttacctgtcgaattcgaactagagctcttcttactttcttttttctgacttgtactcgaagattgcacaacattctggctgctacttcgaagttgcgaagactcactcacttgtgcaatcgatttactagtatctattattttagatgttgtttcactactattattggcagttgctgccgcaaatacagtacctagtgactgcaaaacagttgtcattaataacaaaattattaataaactatagattattcgcttcttcatgcccgatatcctcccacgtcactccataaccgcttaacgactaaggtatacaattttatgtgttctaaatccctacagaacactgattcaaatgattcgaaatagaatcataactcttgagttatggttcttgatagtttctatatagatactctccaaattagagaaggctattaattaaaaaagcctttaatttctataaatcgcgttatactggcgtttattattttaaataatcccattaattgacttgcgcgctattaaacaacggtgtaaactaactgtaatgttaataattcacaactcaagagttattatttttatttttgctattttattaaatatatagttattaaaaaatcgctataaacgtttatattaaacgtttatagcgatttttatttgataatttttttcatcattccattatttttaaaagattattaaatcacaatcagtatgatttgttactttatagcaatttcactacccctaaaagatcatttttttacaatataattaaataaaacaatattaatttccaaataaattaattttcacttttaaatattatcataaataaaaaatctagagaatgaatactccctctagatttagtcttatctaatattatttagtttcgtcaggaataacaacaaattgcgctactttactaacatcaccacttgaatttttttcttgaacattgatgatatcaaacagtttccagaaagtacttgatacgtttaccaaatatgatttatctgcctgtacagtagttgttacagattctcctgtccgctggttagttacaacaattgaattccctggcgcataaccagttcctttaaccgttttatcactaagttgttggttttctggaacacccggtgctggaatctcaccgcctttatgttgcactgttgctgttgtacttggactttcaccaaacccagcattttgagttgctgaaattgttacaccagcgttatgggctggaattgtaatgctgtaaacaccacttgcatcaacttcgcctgttccaatgattgggctatctggttgaacaccttgccgtaatgtgatttttgcgcctggaattcctgaacccgttacaactgtatctgtgtcataaatcgggttatgaattgttggggcttgtttcaagatatcgtacccaggatctaattgccaaattggaatggttgttgcgccatttgtattaccaactaaatgccaatcgataatacccgcatcatctttatctgtgattgtacttgctaaatgatatgctgatttgtcataagcatctggaatacgtacgcctgtatctgttaccatatcgcctaagttaagatcaaattcaacgtgcatttgaacatttaagccgatacctgttacagtagggttatcaaatttcaataagtatgtgtcatccgattgtgtatctttttcgatatgcatttcatttgatgtgtaactatggttaattgtattgattgatgatgtgtaattgaagtttgctgatgcaatatatttgagtaatgagccatctttagcgaaagcattgaattctcttggcaacttaattgttgttacagtatgttcttgccaattaagtgctgcgaatgatttcacatcatatttcatgtgaagcgtcccacgtgttacttgattgccggcgattaattctaaaccgtccatcgctgtaccgcttgctgctaaagtaccagatgtttgataatcaatacgaggactgttatctttcttagtcattactgatgatgtgtcggcagatgttttagctgcggccatcgctgttgatgttccagctgttactaccattcctaataccgttgatgataccaatactaagtttaccaattttgaacttttaatcatgcttttcgcctccaagtgcgttttatatttttagctcagcgattattagtcaacgacgttaattgcctttgctatgtgaataatgtatcatctctttttttgatagtgcaagtgatattttcgattagtttttactgatgctaccaaactcatcggcgctgtaagcgttacaaaaataaactttttttaaatttcttcttccgagcatgttatttttttaacttgtttactattatattttgagacatgtaaatataatctaatccttatataaatcctattataccggctgttttcaggattcatgataggattagaaataattaaccgtcgatactaaaaaagcattatctgtaaaatcacccttttgaggtcattttatagacaatgctttttgaattgttcattaacgtaatatcactaaaccaaccgttaataccgccattgcaacaaacgcgagtgtatctcttgtttgccattttaggacgcggtatttactgcggccttcgccaccttgatagccacgggcttccatagctgtcgctaaatcatcggcccggttgaagctgctgacaaatagcggaatcaaaatcgggataatggatttcatttgttgtaagagactaccttctccgaaatcaacaccccgcgcacgctgcgcattcatgatcttcgtcgtttcatccatcaacgtcggtacgaagcgcaacgcgattgataacatcaatgcgacttcatagactgggaaatgaatgacttttaacggcttcagaatcgattcgatcgcatctgctaataataacggtggtgtcgtcaacgttaagagcgtcgacatgaagataatcagcacgaagcgcatgaagatatatgccccgttgagtaacccgaacttggtcaggctcaagaagccccattgccaatagacggtccccccacgcgtgaagaagatttgaagtaaaacggtaaagaggatgagacacaataatggccggacccctttcaagaagaaactaagtttaattttcgaaattagaattaaggccatcgtgaaaacaaataacaagagataagctggccatgagcgtgctaagaaaatgatcccgatgtaatagaaactggcgattaacttcgcccgcgggtccattcgatggaggattgaatcccccggaatataacggcctaagattagtttattcattagcgccacctgctccctgcggtaattgatcgcgcaacatcgctgctaattcgtgttctgttaatggtaccttagggaatacaaagcccttcttgattaatgcttgggcaaactgcgtcgtggttggtaggcctaattgcttagacgttagccactcagggtccgcaaaaatttcgcgcggtgtcccactcttggcaatcccgccattttccaaaacaacgacatgatccgcatagttggccacatcgtccatttgatgcgtgaccatcacaattgtcataccttgttcgcggtgtagtttttcaaataaacccatcatttcccggcgcccgactggatcgagcccggcggttggttcatcgagaattaagacctctggctgcatagccaagacaccggcaattgcgactcgccgcatctgaccaccggataaatcaaacggtgattgttctaaaacggcttctggtagaccaaccaattcgaccatcgctttagcccgttcaagtgcctcagcttcaggcacaccgaaattttggggcccgaaggcgatatccttttggacagtggcttcaaataattggctttctggaaattggaagaccataccgactttttgccggatgatcttcaaatttttgttattcgtttcaggcgtaatctggcgatcaccaatctgcacgatcccttcagtcggcttcaacaacgcgttcaagtgttgcaataacgtcgatttgccactgcccgtatggccgattaatgccgtataagagcctgattcaatcgttaaattaatgtgttttaacccaatcccttgaaaaggtgtcccgggttgatacgtataacttacatctttgaatgtaatgtccatagatgatcaaccatcctttccgttgtgagatagtcagctggcatcggtacaccgagcttagtaagtgctgctttgagtttctcgggataaggcacatctaacccaaggtcaagcaggcgctgcccatatgcgaagatttcggctggtgtcccttgatcaatcacttgtcccttatccagcatgacaatccgatccgcactagccgcttcgtcaatatcatgggtaattgaaagcacggtcatattcgtttcttgtttcaacgtatgaatcgtctcgaggacttcttgacgccccttaggatcaagcatgctcgttgcttcatcgagaatgaggatctcaggttgttgggcaataatgcccgctaatgcaactcgctgcttctggccaccagataaacgacttggttcgcgcgtcataaattgggtcataccaacgcggtcaactgcatcttgaacccgccgctgcatttcagtccgttcaatcccttggttttcaaggccaaacgcgacatcatcttcaaccgtcgcaccaacaaattggttatctgggttttggaaaaccatgccaatcttacggcgaatatcccagacggtttcaatcgataaaggtaagccatcaatcgtaatgcttcctgactgtaaatctaataagccattcagggatttggcaaatgtactcttgccactcccattatgaccaataattgcgacccactcaccagcattgatgctgaccgataaatcattaagggccaaccgactcgcctgtgggtattcatattttaaatgtgccacttctatgattttattttcatccattgagaatacctaatttcatgatttagagtgccgtttcaagcggtagcttctgagtatagcataatcagtcaaattaacgatgtaatcgttgatttgactgatgtcgctagacggaagaagttgcttgaaaaggcacgttttcgataagagtgccgttcaaagcgttttggctctgagcattagcctagtatcgtgaataagcgatgcaatcgattatttgcgatgcgtagctaagcgcaggaagttgctactaatggcacgtttcactttagagtgcctttgaaaatagttaggttccgagcatttacctagttcagtgaataagcgatgcaatcgcttgtttgcgggacgtagtaaagcacaggaatctactttcaatggcacgtttctactaaaaccgccccaccacttgcttctagggctgcgaaactaccctctattttatcatagaatccccttaaagtggctgtgtaagtcgctctgtttataaatccacttaacacaaaaaacgcctaactctgtaaacagaattagacgttttattatgtaaatcatcaatcgatgaaagttatgctgtggtgctaacataaccttaggactagacttggcaaataaatgccatcatcataacgccctgtctcatcgatcaaatgacctagaaatcattttttattattaaacaagttcaataataaccattaatgcaccgtcaccacgacgaggggctgttttaagaatacgtgtgtaaccaccatttctttcagcataacgtggagcaatgtcactaaataacttttgtaaagcagattgaacgattactgcttcgtcttcttcgcgaatatcagctacttcgttacgaacgaatgctgcagcttgacgacgagcgtgtaaatcaccgcgtttacctaaagtgatcattttttcagttgttttacgaatttctttggcacgagcttcagtagtaacgatacgttcattgatgattaaatctgtagtcaaatcacgtaacattgctttacgttgagagcttgtacgacctaatttacgataactcatgaatggagtccctccttcttatcagtttattcttctgtgcgtaagcctaagccaagatcaaataacttgttcttaacttcttctaacgacttgcgaccaagatttctaactttcatcatatctgcttctgatttgtcagttaactcttgaacagtgttgataccagcgcgtttcaaacagttgtatgaacgtactgataaatctaactcttcaattgtcatttcaagcattttttctttatgcgtctcttctttttcgaccatgatttcagcattcttcgcttcatcagtaagatctacaaagattgccaaatgctctgtcataatcttcgcagctaagctaatagcttctctaggactgatggaaccgtttgtccaaacatcaagtgttaacttgtcgaaatcgttacgacgaccaacacgtgtactttctacttgatagttgacacgactgattggggtataaattgagtcgattggtaaaacaccaattggcatatcgtctgacttgttttgaacagcagcaacataaccacggccttttttaactgtcattcgcacgtggaaattgccgccttcagctactgtacaaatatattgatcagtatttaagacttcaacatcgtcatccgaaatgatatcagcagcagtaactgttgctggtcccttaacgtcaatctcaatcgttttgtcttcttcaacgtgcaatttaagtgctaattttttgatattcaagatgatttgtgtcacgtcttctaggacgccatcaattgttgaaaattcatgtaagacaccatcaatttggatatctgtgacagcagtaccaggtaaagatgccaataagatacgacgtaaagagttacctaaagtcgtaccgtatccacgttcaagtggttcaacaacgaatttaccgtagttagtactttcatcaacctttgtaatgtttggtttttcaaattcgatcattcttatcttttacccctttcaaaacgagaagtgtttatacgtgaacacgtttcagtttgtctcaaaatgaagcgtagcccagactaaacacgacggcgttttggaggacgagatccattatgaggaactggtgtgacgtcacgaatagcagtaacttctaaaccagttgcttgtaatgagcggattgcagcttcacgaccagaacctggtcccttaacagcaacttcaatagatttcataccatgttccatggcttctttaccagcagcttctgcagccatttgagcagcaaaaggtgttgacttacgactacctttgaaacctaatgaaccagcagatgaccatgcaacagcattcccgttaggatcagtgatcattacaagagtgttgttaaatgttgagtgaatatgtgctacgccagcttcgatatttttctttacacgacgcttacgtggtgcattcttcttgtttgccataaattataacctccttttactgattattttttcttgcctgcgatagaaactttcttacctttacgtgtacgagcgttgttcttcgtgttttgaccacgaactggtaaaccacgacgatgacgcatgccacgataagaaccgatttcttgtagacgtttgatgtttaagctaacttcacgacgaagatcgccttcaactttaactgtatctaatgctgcacggatcttgtcttcttgatccggcgttaaatcgcgtgtacggacgtctgttgggacgccagcatcagccaagactttaacggcagttgtatttccgattccgaaaatataagttaaagcaatcacaatttgtttatcacgtggtaaatccacacctgcgatacgagccattcttgcacctcctgcttattaattaaccttgacgttgtttatgttttggattagctgcgcagataatcataacgcggccttttcgtttaataactttacaatgttcgcacattggttttactgatggtcttactttcatatcgactgacctccttgatatgatccttacgcctatttaaagcgatacgtaattcgtcccttagtcaaatcatatggtgatagttcaactgtcacacggtctcctggtaaaatcttgatgtaattcttacggattttacctgaaacgtgtgccaaaatcacagcaccgttttcaagttctactttgaacattgcatttggtaaagtatcagttactttaccttcaatttcaatgacgtcatcttttgccacgcaaaagtacccccttgtggttatgaaaattcatacagaaaaatggtgagagctctccgcactcaccctagtgtcataccgagatattatatcacaagcattaaatttttaaaagcactgattacttagtcattaacaacaagtcaggcttttacgtgaataatgacctaaaagatcacttgagttgatgactagtctttaatggtatcaagtacttttttaacggcagcgaacacgtcatcaatttcttgattcccatctaccgtgtaaagcaggttacgtttttcataaaaatcaagtaaaggtgtattcatttcgatattgacctttaagcgattcttaaccgtttcaggtttatcatcttctcgttggaagaagacgtggccgccacagcgatcacatgtgccttccacttgagttggatggtaaagcttatggtacgttgcaccacaagttttacaaatgaagcgaccagataaacgatcagccaagatttcaggatcaacatcaatgttgatcacaccatctaaaggtttgttcaatttatcagtaatcactgccaaagcatccgcttggtcaagtgtccgaggaaaaccatcaagaagataacctacattagtatctgcttgtgaaagacgttcctcgacaattccgtttgtcacatcatctggtaccaattcacctttatcgatgaaggccttagctttaacaccaaggtctgtttgatctgccatagcagctctaaacatatcaccagttgaaatgtgtggaatatgataagcgtcaacaatcttttcagcttgcgttcccttaccagcgccaggaagtcccattaacatgagattcatgcctttgcctcctatttaaaacaaggattcaatactttttaaacgataattgcttatcgaatgaagccaacgtatttccgtttcatgagtaaaccttcgagttgacgagtgctttcaagcgccacaccaacgacgattagtaaactagtcccacctaaaccaattgattgaggtagaccaccgaggtttgctgctaattgaggtaataatgcaattacccctaagaacaacgcaccgacagtcgatagtcgcattaatacgctggagagatatttctcggtacctttacccggccaaacacctgggatataactcccttgtttggtcaagttctcagcaactttttcagggttaacctgaacaaatgcgtagaagaaggtaaagagaataatgagcaccgtataaacaatcgaacctgtcacagtttgcatactgaagatgtctgacataactttgaaccaagcatcttcaccatgacttgcctggaaggccattaagattgtttgaggtgtcataataaatgaactagcaaagataaccggaatcacaccagcaacattgacctttagtggtaagtaactgttgtcacctgcacctgcttcgcgacgtgtatattggattggaatcttacggttcgcttgttgaacccaagtaacgaaagtcacaatgactaataccgctacgattaagccaacaacgaacaagattcctaaccacatttcacccttagaagcattcaagacatgttccttgatgatttgatgaaggccacttgggaggcgcgcaatgatacctgcgaagataatcattgaaacaccattccccaaccctttatcagttatctgttcacctaaccaagtaattaacatcgtaccacccgtaaggatgatcccgatgctaacgaaggtcttaattcctggatctttaaccaagcccatttgactgagtgagttaaagccagcagtaatcccaattgattgaataaacgctaagatgatcgttaagtaacgcgtcacttggttaagtttacgtctcccaatttcaccttgcttgctccattcaacaaatttaggcacaatgtccatttgtagtaattgaaccacaatttgggccgtgatgaatggtgaaacccccatcgagaagatggagtaattcgccaagccaccaccactaacagtatcaagtaaaggaatcaaaccagttgatcctaacttggttaacgcgccagcgttaacacctggtactgtaatctgtgcacctaaacgataaacaatcaaaacgcctaaagtgaacaaaatcttactacggatttccttgactttaaatgcgtttcttagtgttttaagcaattaaatcacctcaattgaaccgccagcagcttctacagcagcttttgcagcttcagaatacttgcttaccttaatgttcaattttttgtttaattcaccatttgctaatactttaacacctgaaagttcgttcttaacaacacctgcttcgattaatacagttgctgtgatttctgtaccgtcttcaaaacgatttaaatcgttaaggttaacgacagcatattctttgcggttgatgttcttgaagccgcgttttggcatacgacggaataaaggcatttgcccaccttcaaagcctaaacgtaccttactacgagccttttggcctttttgtccacggccagctgttttaccagtacctgaagacgtaccacgaccgacacgcttgcgaacatcgcgagcaccttcgttaggtttcaattcatgtagtttcattattgtgcgcacctccttgcaatatatgttgaaattagtctttaatttcttcgactgttactaaatgtgcgagtttgaaaatcacaccgcgagttgcagcatcatctggtttgattacagaactatttactcggttcaagccaaattctttgaccattttacgttgttctggaagacgatgagcagcactttttcttaaagtaatctttaatttagccatgttcagttatcctcctagttttgtaagctttctacagagatattacgcaattctgcgatttgttcagcagtcttcatacgagttaaaccgtcaattgtggcacgaataacgttgatagcagttttgctacccaatgttttacctgtcacatcatcgattcctgctaattccatgacggcacgaacagcgccaccagcggcgataccagaaccttcaacggctggttttaatagaacacgaccagcgccaaagcgaccgataacttcatgaggtaaggttgtaccaaccttaggcacattgattagattctttttagcgtcttcaacggctttacgaatagcttcaggtacttcttgagctttaccagtaccgaaaccaacgtgaccgtttttatcaccaacgattacgatagcagcaaaacgtagacgacgtccacctttaacaacttttgtaacacggttgattgaaacaacgcgatcttctaagtctaaatgagttggatcaatgtaagtcataaatggttttcctccttattagaattctagtccgttttcacgagcagctgtagctaaagcagcgatacgaccatgatataaatagccgccacgatcaaagacaacaactttgtggcctgctttaactgcacgttgtgcaactaatgcgccgacttgttgtgcttgttcgactttagttccttctacttttacttctttatctaatgttgaggcacttgctagcgtcacacccgctacgtcatcaataagttgagcgtagatgtttttgttagaacggaaaacgttcaagcgtgggcagtcagcagtaccagagatcttgccacgaacgcgtgtatggcgtttttgacgtgtcttattcttgtctggttttgaaatcacaattttcacctcttaatgttgtttaaacagctaggctgctttatttaccagttttaccttctttacggcgaacatgttcatcagtataacgaatacctttgcctttgtaaggttctggaggacgtacatcacgaatttcagctgcgaattggccaactttttgtttgctaataccgctgataatgatgtttgtgtttgatggcacttctacgttaacaccttctggtgcttccatttcaactggatgagaataaccaacgtttaatactaaagttttaccttttaattgagcacggtaaccaacaccgataagatccaatgtcttcttaaaaccttccgttacgcccaaaatcatgttgttcaagttagcacgcattgtaccgtgcattgcacgatcactatcactactacgtgtaaagttgataaggttaccttcttcgtgcatttcaatgattggattgaaatgacgtgttagttcacctttaggtcccttaactgtgatgttgttttcaccgtctttagtaacggtaacacctgcaggaacttcgattacttttaatccgatacgactcacgttacagcacctccttaatttgagtttagattaccaaacgtatgcgagaacttcgccgccggcagccttttcacgagcttctttgtctgttacgacgccgttacttgttgagataatagcaattcctaaaccatttaataccttaggaacttcgttagcttttacgtaattacgtaaaccaggttttgaaatacgtttcaaaccagagataacacgttcgttattcttaccatacttcaagaatacacggatgataccttgtttgtcgtcttcaatcacttcgtaatcgcggataaagccttcgcgtttcaagatttcagaaatatcttttttaatacgtgaagcaggaacttctaaagattcgtgacgtaccatgttggcgttacgaatacgtgttagatagtctgcgataggatctgtcatgaccatgtggattaacctcctttattgaatcttttgattaccagctggcttttttcatgcctggaatttggcccttatgagctaattcacggaggcaaacccggcaaagcttaaacttacgatatacagaatgtggacgtccacaacgttcgcaacgtgtgtattcttgtgttgagaattttgcaggacgatgattctttacaactaaagattttttagccaagaaattgacctccctttttatttagcgaatggcatgccaaattgtgttaacaattcgcgtgcttcttcgtcagtgtttgaagttgttacaataacaacatctaaaccacgaacgcgatctaccttatcataatcgatttcagggaagatcaattgttcgcgtacacctaatgtataattaccgcgaccatcgaatgattttgcactaacaccgtgaaaatcacgaacacgaggtaaagatacgttaactaatttatctaagaaatcgtacattctttcgccacgtaaagttactttagcgccgattggcataccttcacgtaaacggaagccagcgattgattttttagcttttgtgattaatggtttttgaccagcaatcaaacctaattcttcaacagctttgtccaagttcttagcgttagaaacagcatcaccaacacccatgttaagtacgatcttttcgatcttaggtacttgcatgcttgatgtgtagttgaatttttcgatcaacgctggtgtcatttctttaacatatttttcttttaaacggttagtcatgtaaaaagtgcctcctttccccaaaagattatttatcgattgattctccagttttctttgacacgcgtactttcttgccatcgacaactttgtagcctacacgagtagcttcgttgtttgatgggtcgattagcatgacgtttgaagcatcgatacttgcctctgtatcaacaatcccaccattaggattttgagcatttggcttaacgtgctttttaatggtattgataccttcaacaacaactcgaccttctttaggcatagctttgatgattgtaccttctttacctttatctttaccgctgattacttttactttatcaccagttttaacaaacattgatatacgcacctccttggtagtctgtaattatagaacttcaggcgctaaggaaacgatcttcatgaaatcactgtcacgtaattcacgtgcaactggtccgaagatacgtgttccttttggagtcttgtcatcattgatgataacagcagcgttttcgtcgaacttgatgtaagaaccgtctacacgacgagcacctgacttagtacgaacgataacagctttgacaacttcaccttttttgacaacgccacctggtgttgcctgtttaattgttgcaacgataacatcaccaatattggcagtcttgcgacctgagccacctaaaactttaatagttaaaatttcacgggcacctgagttatcagcaactttaagacgactttctgattgaatcacttataggtcctccttccgtcacttaattatatgagtaacgatttagataataactgctttttcaacgacatctaataaacggaaccgttttgtacgtgacaaaggacgagtttccataacacgtacaacgtcgccaacttttgcttcgttgttgtcatcttgtgcataatatttctttgaatatttaacacgtttaccgtattcaggatgtgttttataagtttcaaccatgacagtgattgttttatccattttgtctgaaacaacacggccttggtacactttacgatggttacgactttcttcgctcaaagtaaatagctcctttccatttattatttgttaagttcttgttgacgtaatacagttttaatccgtgcaatgttctgacgaacttgctttaagcgggcggtattttctaattgaccggtagcttgttggaaacgaagattgaataattcttctttgtattggtgttctttttcaagcatttcagcagtggttaattcaataatatctttagccttcatttgactcgccacctacttcctcgcgttttacgatcttagttttaactggcaatttatgtgatgccaagcgtaatgcttcacgagcaacttcttcagaaacgccgccgatttcaaacatgatcttttcacgttttactacagcaacccatccagcaggagcacccttccctgaacccattcgaacgccgacaccttttgcagtgtatgatttatgagggaaaattttaatccacactttcccaccacgtttcatgtaacgagtcatggcaacacgggcagcttcgatttgacggttggtaatccaacttgattctaatgcttgtaacccgaattcaccaaaagtgacttctttgccaccttttgcagcaccgcgcatcttcccacggaattcacgacgatgttttacacgtttaggtactaacatgtttatttccctcctttcgtattgttgttggctttagcaggtaatacttcgccccgataaatccaagtcttaactcctaatttaccgtaagtagtcatggcttcgtcccatgaataatcgatgtctgcacgtaatgtatgcaaaggaacagttccttgagcatgtgtttcgatacgagacatgtcagcaccgttcaaacggccggcaacttgagttttgatacccttagcaccagcgcgcattgtacgttgcatagcttggcgttgagcgcgacggaaagcaacacgtgcttccaattgacgagcaataccttcgcctactaaatgagcgtctaaatcaggtttcttgatttccacaatgttgatgtgtactttcttgcctgttaagttatttaaagctttacgtagattttctacttctgagccgcctttaccaatgaccataccaggtttagcagtatggattgaaacgttcacgcgatttgcagcacgttcgatttcaatagtagagacagatgcgtcagctaattttgtgttgatatatttacgaatcttaagatcttcgtgtaagaatgttgcgaaatctttttctgcataccatttagcgtcccaatcacggatgacgccaacacgaaaaccggttggattaatcttttgacccacgcgatatccctccttatgcttctttttctgatacaactacagtgatatgacttgtacgtttgttgattggtgatgctgagcctttagcgcgaggacgaaaacgtttcaatgttggtccttcgttagcgtaagctttcgtaacaaccaagttttctgcgtctaagtcataattgtgttctgcgttagcgatagctgacttcaaaactttgataacaactggtgaagcagctcttggtgtaaattctaagattgcaattgcttctgcaacactcttgcctctaatcaagtcgattaccatacgcactttacgtgcaggcatgcgaactgacatagcactagctgttgcactagtaatttgatctgccattgagattcatcctcctttctagcgtgcttttgttttcttatcgtcatttccatgaccatggaaagttcttgttggtacaaattcgcctaatttatggcctaccatatcatctgagatgaaaacgggaacgtgtttccgtccatcataaacagcgattgtgtaaccaataaagctagggaaaattgtcgagcgacgggaccaagtcttgatgacttgtttcttttcgctgtcggcttgtgcttcaatcttgttgagcaagtgagcgtctgcgaatggtccttttttcaaactacgactcattatgaaacctccttcgaatgaaaagtgcaacgtgccctaattgcttaggccgcgttggctttggataagttcaatttaaattgattatcttgatttacgatgacgaataataagtttctctgaacgagccttactactacgagttttcttaccaagtgtcttcttaccccatggagacataggagaaggacgaccgattggcgctttaccttcaccaccaccatgaggatgatcgttagggttcattactgatccacgaactgtaggacgaatacccatccaacgtttacggccagctttaccaatcttgattaattcgtgttgaccgttaccaactgtaccgaccgttgcacgacatgtaagtaggatcatacgtgtttcgcctgaagttaaacgaacgatagcgtatttgccttctttacctaataattgagctgatgtaccagctgaacgaaccaattggccgcctttaccaggttttaattcgatattgtggataagagtaccatcaggaatattagctaatggtaatgcgttacctactttaatatcagcattaacaccagattcaacgatcatacctacttcaaggcctttaggggcgatgatgtatgctttgataccatctggatattggattaatgcgatatttgatgttctatttggatcatattcgattgacttaacagtcgctttgatatcatccttaatacgcttgaagtcaatgacacggtaatattgtttatgaccgccgccacgatgacgaacagtgatatgaccatgtgcattacgaccagcagtatggctttgggattccaacaacgtcttttcaggggttgtctttgtgatctcagcaaaatctgagctggtcatgttacgacgaccatttgtggttggtttgtacttaataattcccacgtgtatgccctcctataatttattctatttaatgttaattaatcttcaaaaatcttgatttcttttgagtcagctgttaatgtcacgattgctttacggcgtttcttagtgtaacccgcatagcgaccttggcgttttaacttgccacgaacgttcatgatattaacgtttttaacgttgacaccaaagatttcttcgattgcgtaacgcacttgtgttttgttggcacgaacatcaacatcaaatgtgtatttcttgtcgtccattgcagccattgagctttcagtaactactgggcgtaaaataacatcgcgtgcttccattatgcaagcacctcctcaattttagaaagagcagcttgagtaaggattaatttttggttgcctacaacgtctaatacgttgataccatcagcaggaacaactgttacgttaggtaagttgcgagctgataaagcagtaaaatcatttccgtcttcaagaactactaatactttagtattaacatctaacttgttaagtacttcagcgaattccttagtcttaggtgcatcaaagctaaatgaatcaacaacgattaaatcattatcgataaccttttgtgaaagtactgacttgattgcaagacgacgtaccttacgaggtaatttatagctgtatgaacgaggtgtaggtccgaagacaacaccaccgccacgccattgaggtgaacggattgagccttgacgagcacgaccagtacctttttgacgccaaggtttacgaccaccaccacgaacagctgatctgttcttaacagcgtgtgttccttgtcttaatgatgcacgttgcatgatgatagcatcaaatacaacattttcattaggttcgatagcccagattgagtcgtttaattcaacgttcccattttggctaccatcttgtttaaataatgttacgtttgccattggtaaaatcctcccttctcagattatttatgagctttaacggctgttttaattgtaaccattgagtttttagcgcctggtacgttacctttaacaagaataacgttcttttcaacgtctgtacttacaaccacaaggttttgaacagtacgttggttgttacccatgcgtccaggtaataatttacccttgaagacacggttgataacagcacccattgaaccaggacgacggtggtaacgagaaccgtgacccataggcccacgtgattgtccgtcttttttaatgttaccttggaaaccatgacctttcgttacaccagtaacgtcaacgacgtcgccggctgcgaaagtatcaactttgatttctgttcctacttcgtaatctcctaatgcgacatctctgaattctctaatgaagcgcttaggagtagtgtttgcttttgctacatgacctttagcaggtttgtttgacaagacttcgcgtttatcttcaaaaccgacttggatggcttcatagccgtctgtttcgtttgttttaacttgtaaaacaacgtttggagttgctgcgataactgttacgggaattaattcaccgttttcagtaaagacttgtgtcatacctacttttctacctaagattccttttgtggtcatggtaacacctcttttcaattattttttatttggataatgctaattaaagcttgatttcgatgtcaacgccactaggtaagtcaagtttcatcaatgaatcaactgtcttaggtgttgggttaacaatatcgattaaacgtttgtgagtacgcatttcaaattgttcacgtgaatccttgtgcttatgtggtgaacgtagaactgtgtataaagttctttcagttggtaatgggattggaccagagattgaagctcctgttctctttgctgtttccacaatcttatcagctgattgatctaaaatacggtgttcgaatgccttcaaacgaatacgaattttttgttttgccatgtttttccctccttcgtctattttaaaagtagactagctccgtgaaaatttttccggcacgcccgcccatggcaaagcggccgggtgtgtcgcaacctctcacatcttagctactcggggtatcttgcgacccccatgtgtgcaaacctctgctatagaaatagcaccttatatatcttacaagatagagcgcgataacgcaaccccttttttgctgatttatcaaagtttttcatgacattttcattacaaaaacgtcaacagcatgttagtagccttttccatcggttttcgttaaactaaagttaatttcaaacctcaggaggcctcttccaatggataaagctgcgttattgatcatcgactacacgaatgacttcgtcgccccagacggtgccttaacggctggtaagccggctcaagacatcgcatctaccattgtaacacttgcggaccaattcttggccaaaaaacagtttattattttaccaactgacttacatgttgcaaacgaccctttccatccagaagctaaactctttccgcctcacaacctcgcagatagccgcggacgcgctttttatggtccactagctaattggtatgccgaacaccaagacagcccctacgtctacgcattcgccaagaatcgctactctgcgtttgcgaacactaatcttgataacttcttacgcgaacggcagattaccgatttgcatttaactggtgtctgcaccgacatttgcgtgctgcacacagccgtttcggcttataacctgaattatcccctgacgatccacaaaaaagccgtcgccaccttcacgccaaacggtcaggaatgggcgctggcacatttcaaaaacagtttaggcgcaacaatcatttagcacttttcttctataaaatataaaagccaccgccaattcaaaattggcggtggctttctttgtttgttatgtttcgaaaaaaacgctaaaaaatgttatgccaaggcggtggcaatcgagttagtaggagttgaacctacatcaaccatcttattcggatcaccttaatatcgttgcgccgttttaatcgtgccttcgaaagcaattaaacacaggtctccaacttaatactaagtgaaccgactcgattttcttgggaggaatttcaaatgatggttcgttctaccgattgaactataactcattggtgttgcttgcgatagctaattctttctagggagagctaccacacaaaattaacaaaatcagatgattcttgggaggaatttatctgatatataaagaataacaattagttgtgaacaaaatgtgaacattcaattacgaaactgtaaaagaatgacatcgctcacaactaaaaaaccgagttgcttttgacagcaacccggtcacaaaaaaacgatattaagcaattagtgcggtcaaacgaccgttctgacgaacgattcgcttattggccaccgttcttcttaatgatttcttcttggatgctcttaggaacagctgagtagtggtcaaataccattgtaaatgtcccacgaccttgtgtagctgaacgtaatgttgtcgcataaccaaacatttctgacaatggaaccattgcattaacgatttgggcattaccacgtgcttccataccttcaacagcaccacgacgagcagttacttgtcccatgatatcgccaagatattcttcaggagcaataacttcaaccttcatgataggttcaaggatttcagcgccagcttgtttagcagcgttcttcaatgccattgatgcagcgatcttaaatgctgattcattagaatcgacatcatgataactaccatcatataacttagctttaacgtcaatcaatgggtaaccagctaagacaccgtttgccattgattctttcaagccttgttcaactgatgggatgtattcacgaggaacaacaccaccgacgatagcgtcttcgaattcgaagcctttaccttcttcattaggtgtaaattcaacccaaacgtcaccatattgacctttaccaccggattgacgaacgaatttaccttgtgcagatgcttgttttgtgaatgtttcacggtaagcaacttgaggttcaccaattttggcaaccactttaaattcacgtctcatacgatcaaccatgatatccaaatgcaattcacccataccagaaataagcgtttcgcctgtttcattgttggtttcagccttgaatgtaggatcttcttcagcaagtttttgtaaagcaagatctaacttatcacgatcttcttttgattcaggttcaacagaaacttggataactgggtcagggaattccattgattccaagattaatggatgatcaacatcagtcaatgaatcaccagttgttgtattcttcaaaccgattgcagcagcgatatccccagagaatacttcaggaatttcgttacggtgatttgaatgcatttgtaataaacgaccaacacgttcacgtttgtctttagttgcattcaagatgtatgaaccagattgtaatgtaccagtataaacacggaagaatgttaaacgaccaacgaatgggtcagtagcaatcttaaatgctaaaccagcaaatggtttgtcatcgccagccatcaattcaacttctgaatcgtcttctgggtttttagcgttataagggcgtacgtctaatggtgatggtaggtaatctacaacaccatccattaacatttgaacacccttgtttttgaaagctgaaccagcgaaaactgggaagaatttcaaatcgatagttgcttgacggatcgcagctttcaattcttctttagaaatttcttcgccttctaagtacttgtccataatgtcgtcattaacatcagcaacagcttcaactaattcggcacgacgttttgtagcttcttcaaggtagtcagcaggaacatcaactgtatcccacttagcacctaattcatcttcgtcatagatatcagcttgcatttcgatcaaatcaataacgccttggaattcatcttcagcgccaattggcatttgaacggcatgtgcgttagcttgtaggcgatcttccaatgttgtcattgaataatcaaagttagcgccaagtttgtccatcttattaacgaaaacaatacgaggtacaccataagtagtagcttgacgccaaacattttcagtttgaggttcaacccctgattgagcatctaagacagtgatagcaccatctaaaacacgcaatgaacgttcaacttcgattgtgaaatcaacgtgacctggtgtatcaatgatatttactcgattacctttccattcagcagttgtagcagctgatgtgattgtaatcccacgttcttgttcttgttccatccaatccatttgtgaagcaccttcatgtgtttcaccaatcttatggattttaccagtatagtacaagatacgttctgtagtagttgttttaccagcatcaatatgtgccatgataccaatattacgcgttttgtctaacggaaattcacgtttgtttgccatatgtgaatgttactcctctcgaatattaacctaaagacaacaagaggccattatatgattttttaaaaaacatacaatagccaaccttgataatcttaccagcgataatgtgcaaatgcgcggttggcatcagccattttatgtgtatcttcacgtttcttaacagcagcaccagtgttgttggcagcatccatgatttcacgtgcaagacgttgatccatagtatgttccccacgtaggcgagcgtagcttactaaccagcgtaaacctaaagttgtacgacgttctggacgaacttcaattggcacttggtagttagaaccaccgatacggcgggctttaacttcaagtactggcatgatgttgttcatagcttcttcgaacacttctaatggttcattaccagtttcttctttaataatatcaaatgcgtcatataagattgttgacgctgtaccacgtttaccatcaatcattaagcggttgattaagcgtgaaaccaatttagaattgtacattggatcaggtaaaacgtcacgttttgcaacatagccttttcttggcatcctgataacctcctcaagatatttaagtccttgaagtaacacacagtgtcatttaaacttcaatcgactttttcaaatttttttgtgtgttattttttaggtctcttagtaccatatttagaacggctttgcatacgaccgtcaacaccggctgtatctaaagcaccacgaataacgtgataacgaaccccaggtaaatccttaacacggcccccacggataagaacaacactatgttcttgtaggttatgaccaataccaggaatataagctgtgacttcgattaagttagataagcgcacacgagcatacttccgtaaagcagagttaggctttttaggtgtcatagtaccgacacgagtagcgaccccacgtttttgtggtgctggattatctgtagcttttttcttcatactattgtagccaaagtttaatgcaggtgcatcagactttgaagttcttgatttacgacccttacgtaccaattggttaattgttggcatttgaaggttcctccttccttgatctgaaagttatttttaagttttaagtccacacatccaggtggttctttttttgtgataaaaaaatggcaacctagattgcgcgaaatgtgatgcatttttagacgtcagtcagcatgtctgttatccagaaaacctccgtaaaaagcacatctataagaatagcatgcaaaaaatcgaaagtcaactcgatttcggctacttttctgaaaaaagcaacgtccttttaccgtagtttaagagtaaggaggattcacttatgttactttatttaatcatcttttatagcggtgcttgttgcgcctcatttctaacagtttgcgcctggcgcttacccatcgaaaagtccattatcacaccacgttcgcactgcgattgctgtcagcagtcactggcttggcatgatttattaccactattcagctacttatacttacgtggccactgccgcacttgtcatgctcagattaagcccacttttttattcagcgaactaattggtggtctattggcctgcttcatttttagcgaatccctttcttgggacctcgcttatttactcgtgattcttttttacatcagtctcgttgacctattctactatattctctatccaatccccttattcgcatcactggtgcccctcttttatttgtattggccacagaatcattggctaggagccatcgtcttttgttgcgggctgttgctcaccacttactgggcgtctggttttggttttggcgatgtcgagttactcactatcctaacgttgtgggtcggccttgaatccgttttgcgaattctcttagcagcctgtttaatctgtattctatttcaaggcatcaaaaaaatctggccatcgcctaaacaagcgacgcgccagattccttttattccctatatatcgatgggagtggtgataatactcctacaaacaccacaataatgattatttcttttccaaaaacgatgccgtagacatcacttgccccattctcgggaaaatatattgcaagctgtgttggtgttcaatcgccgtgctggcggtcattgcatcttcaatgaagatttggtgatagttatgttcaaacgcatcacgcgccgttgattctacgccaatatttgtagaaatcccacataagacgatggtttcaatccctcttctacgtaattgaaggtctaagtcggtgccgtagaaggctccccattggcgttttgtaatttgatgcgcatttttatagttcgcaatttctgctaataaacgtgtgttcagtagcggtgatggttggcgatagtcaggtgtccgttcacctaaattaggcgttagttgatcttggccgtctgtgacgccaacatttacgaggacaacaaaaccttggtgcgcttcaaagtcttcgattagttgttgggcgttttgaacgaccgtttcacccgcatgaggtgcgagtgttgggcggtccgcaatgccaggttgtaaatcaatcaccactagggctgttttggcataatcaatggttgtcatctgaaagctccttttaatttggtagacaaaaagaggccccgagggacctctttttaacgtgcatttaaaggcatattcctgtgcctagcgctgtccgtcgaataagcgactgtgtcgcttattcaccagactatgctagtgctcggagtataaccgcctttaatcgcacttctttattcttttgtttcttcttgtttcatttgtgcttcaatgtcactgattgagtaaacattttctgagacagcaccgactgtcttaggttccatatgacgatacttcgccataccagtaccagctgggacaatcttaccaatgataacattttctttcaaaccaagtaatggatcgctcttaccgcggatagaagcatccgttaagacacgagttgtttcttggaatgatgcggctgataagaaactatttgtttccaatgatgctttagtaataccaagcaagacaggacgacaagtagcaggtacgccaccgctaattaaggtatcgtggttacggtctgtaaattcgctaatatccattaatgtaccaggtaagatttctgtatcacctgggtccatgacacggactttacgtaacatttgacggaccataacttcaacgtgtttatcgccgatttcaataccttgcatacgataaaccttttgtacttcatgcaagaggtagttttcagttgataatacatcacggactttaattaattgcttaggatcgacagacccaccagtaattttttcaccacgatgaatcatgtcgccttcgctaacaatgatgtttgacgtataaggcacgctgtatgaacgtgtatcagtttcgccttgaaccgtaatttcacgtgtgtgttctgctgggttttcttcaaccgcaacaacttcacccgttacttcagtgatagtagcgatagctttaggattacgtgcttcaaaaatttcttggatacgaggcaacccttgagtgatatcttcaccaccagcaaccccaccagtatggaagttacgcattgttaattgcgtaccaggttcaccgattgattgggcagcaacagtaccaactgcttcgccaacttcaacttcttcgccgttagccatgttacgaccgtaacatttcttgcagacaccgtgttttgtgttacatgtgaagacggaacgaattgtcacttcttcaacaccagcatcaacaacagcttgagcaagctgttcatccatcaattggttcttagcaatcattacttcaccggttgttgggttaaaaatcgtcttcattgcacaacggccgacaagacggtcatacaatggttcgatcatttcattaccttcacgaagtgagtgaataagaagaccacgatcagtaccacaatcttcttcacgaatgataacatcttgtgcaacatcaactaaacgacgtgttaagtaaccagaatcggcagtcttaagagccgtatcagtcatccctttacgggcaccatgggtagacataaacatttccatgacagagaggccttcacggaagtttgatgtaacaggaacttccatcatcccaccattaggagcggccatcaagccacgcataccagcaagttgcgtaaagttagagatattaccacgggcaccagaatcagacatcattgagattgggttcgttggatcaaatgaatccgttaaacgttgttggatatcatctttagcatcgttccaaatttcaataacacgcgcatggcgttcttcatctgtgatcaaaccgcgacggaattgtttagaaatcgttgtaactttcttatgagcgtcatcaacaatttcttgtttttcaggtaattgaggaacatcggcaaccccaactgttaaaccagcatgagtcgcttgaacgtaacctaaggtcttcatgtcatccaataaatcagatgtccgttgaaccttatataccttgaagacttgcgcaatgatatcacttaagaaacctttcttaaatggtaagattacgggtgcaccagccaagtaatcatgaatatcttcaccgttgtcgatgaaatacttgtcaggaacaccattcattaagttatctgttgttggttcatttaaatatgggaagtcagctggcatgatttcgttgaacatcactttaccaacactcgttaccataatcttgtgacgttgatcatctgtaaatggacggttagccatatcagcaactgataaaccaatccgactgtgcaaatgaacgtggccagtttgataagccatcaagacttcgtttgtatctttgaagatcatgccttcgccgagacgatttttttgttcaagggttaagtagtagttccctaaaacaacatcttgagatggtgtaacgattggcttaccatctttaggtgccaagatatgatgagcggcaagcattaacattcttgcttctgcttgtgcttcgtcagataaaggtacgtggatagccatttggtccccatcaaaatcggcattgtaagcttcacaagctaatgggtgaagacggattgatttaccgtcaaccaagattggttcgaaggcttgaataccaagtctatgcaatgtaggtgctcggttcaatagaactgggcgttccttgatcacatcttctaaaacgtcccaaacatcgtcgtcttgacgatcaattttacgtttagcgttcttgatatttgaagccatatcgcgtttaaccaattcgtgcataacgaatggtttgaacaattcaagtgccatttcacgtggtaatccacattgatagaacttcaatgtagggccaacatcgataactgaacgaccagaataatcgacacgtttaccaagtaagttttgacggaaacgaccttgtttccctttcaacatgtgtgaaagtgacttcaatggacggttaccaggtccagtaactggacggccacgacgaccattatcaatcaaagcatcaacggcttcttgaagcatccgtttttcgttttgaacgatgatgtttggtgccattaagtctaacaagcgtttcaaacggttgttacggttaataacccgacgatacaaatcattcaaatcagaagttgcaaaacggccaccttcaagttgaaccatcggacgtaaatccggtggaataactggaatagcatccattaccatccagtcaggacggttacctgacttacggaaggcatctaagatgtctaaacgacggatagcacgtgttctcttttggccttgagctgacttcaagttttccttcaattcagcgacttcgccttcaagatcaacgtcttgtaacaattctttaatggcttcagcacccattttggcgttgaatttgttgccatattcatctaatttttcacggtattcgcgttctgtcatcaattgtttcttttcaagtgctgtatcacctgggtcgataacaacgtatgatgcgaagtaaataacttcttccaaagcacgagggctcatgtctaagacaagacccattcgactaggaatacccttgaaataccagatatgtgtaacaggcgctgctaattcaatgtgacccatgcgttcgcgacgaacttttgaacgtgtaacttcaacgccacaacggtcacagacgattcctttataacgaatccgtttgtacttaccacaagcacattcccaatcttttgtagggccaaagattctttcatcaaaaaggccatcgcgttcaggttttaaggtacggtaattgattgtttctggctttttaacttcaccatatgaccaactacggattttgtctgaagatgctaaaccaatttgcatgctttcaaacttattgacatctatcaaagggcgacctcctcattatttgtaagatagtcaagtgttttacgcactctactaatccgatatcaaacgcttattctgctgatggatcttctgcacttgctgcttgtgctttttcagcttcttgttgcgctttcttttcttcttgttcttttgcgtatttagataaggcatcaacgttaacaacatcgtcatcatcgtcatccatatcgcgcaattcaatttcttgattatcgatatctaagactttcatgtctaaaccaagtgattgtaattctttaaccaatactcggaatgattccggtacaccaggttttggaattggttcacccttaacgattgcttcgtatgtcttcacacgaccaacaacgtcatcagacttgtaagttaagatttcttgtaaggtataagcggcaccgtaagcttcaagggcccaaacttccatttcaccgaaacgttggccaccaaattgtgctttaccacccaatggttgttgcgtaacaagtgagtatggtccgattgaacgggcatgaagtttatcgtcaaccatgtgggctagtttcatgtagtacatgacaccaactgacacacgtgtatcgaatggttcaccggtccgaccatcataaagaatgctcttaccatcagaaggcatgtttgcttcacgaacagcatcccataaatctttatcttgcgcaccatcaaagacaggtgttgcaacatggatacctaagtttctagcagccatcccaagatgtaattcaagcacttgtccgatattcatacgagaaggcacacccatgggactcaataagatatccactggggtaccatctggcatgtatggcatatcttcttcaggaacaacgattgaaacagtccctttgttaccatgacgtccagccatcttatcgccgacttggatcttacgtttttgtgtaatgtaaacacgaaccatcatgttaacacctggtgataattcatcgccagcttcacgcgtaaagatcttaacgtcttggataataccgccgccaccatgaggtactttcaatgatgtatcgcgaacttcgcgggctttttcaccgaagatagcatgcaatagacgttcttcagctgataattctgtcacacccttaggcgttaccttaccaactaaaatgtcgccgtctttaacttctgcaccaacacggacaatcccgaattcgtcaagatccttcaatgaatcttcaccaacgttaggaatttcacgtgtgatttcttcaggtccaagttttgtatcacgtgcttctgattcgtattcttcaatatgaattgatgtatacaaatcttctttaactaagcgttctgaaagaacgatagcatcttcgtagttatacatattccaagtcatgaaagcgatcaatgggttttgacctaaggctaattcgcctttttccatagctggtccatcagcgataatttcatcaacatcaacgtgatcgccttttgcaacgattgggcgttggttgtagtttttaccagcatttgaacgacggaatttcattaattcgtacgtatctaatgagctgtcttcacgacgaacacgaatagctttcgcatcgacatattcaacagttccggcatgttgtgctaataaagcaatccctgaatcgtgggctgctttgtattccatcccagtcccaacaagtggtgcatgtgggttaaccaaaggaacagcttgacgttgcatgttagcacccatcaaggcacggtttgaatcatcgttttccaagaaaggaatgcaggccgtagcgacagcaactacttgcttaggcgaaacgtccatgtaatctaacttgtcgattgatgtttcgatattgtcatccttgtaacgggccaagaccgtgttatcaacgaatgaaccatcatcgtttaatggtgagttggcttgcgcaatgacatagttatcttcttcgtcggctgttaaatagtcgatcttatcagtaacatcatgtgtatcccaactaacacgacgatatggtgtttcaatgaagccataacggttaacaacagcgtagctagctaaactattaatcaaaccgatattagggccttcaggtgtttcgattgggcacatacgaccataatgcgtatagtgaacatctcgaacttcataaccggcacggtcacgagtcaaaccaccaggtcctaaggcagatagacgacgtttatgcgtcaattcgccaagtgggttggtttgatccatgaattgtgacaattgtgatgaaccgaagaattccttgattgaagcaacaactggacggatattgatcaattgttgtggtgttacggtgcttgtgtcttggattgacatccgttcacgaaccacacgttccatccgtgataaaccgatccggaattggttttgtaataattcaccaactgaacggatccgacggttacctaaatgatcaatatcatccgttgaacctaaaccttcttgtaagttaaagaagtagttcattgaagcgatgatatcagcaggaatcacatgttttactttagcatcgatatgaccattaccaattaagttaatttctttatcaggtgtcttttgtgagtaaactttaatgacttggagtgtcattggttcaggcaagacgccttcgtcagaaggttggtaagtaacagctttgaagtcttcttgatctaaataaggtgccaaggcatccatcacttgacgatcaacaagtgtatctttagcagcaattacttcgcctgtgtcaggatcagccaatgtttcagccaatgtttgacccaataaacgtgtcttcaagcttaatttcttattgatcttgtaacgaccaacagaagctaaatcgtaacgtttagcatcgaagaaacgggcaaaaagtaatgaacgtgagctatcagctgtcttaggttcgcctgggcgaagtctttcatagacatctttcaaagcttcttccgttcttgagtcgtcagtattcttatggatatctttttctaacgtcaacattaatgaatcgttgtcgcccaagatatcgataatttcttgatcagacccgtaacctaaagcacgtactaaaacagacattggaatcttacgtgtccgatcaatacgaacgtatgcaatatccttagcatctgtttcaaattctaaccaagcaccccggttagggatgacagttgtgccgtaagttgtccggctatttttatcaatagcactgttgaaataaacaccaggtgaacgtactaattgagaaacgataacacgttctgcaccattaataatgaaagtcccttggtctgtcatcaatgggaagtccccaaagaagacgtcttgagatttaatttcaccagtttcatggtttgttaatttcaaagtaacgtgtaatggtgctgaatagttggcatcatgttgtcttgcttcttcgaccgtatatttaggttcaagaagttgataatcaacgaattctaatgataagttaccagcaaaatcgtcgattggcatgatgtcatcaaacatttcacgaagcccttcgtctaaaaaccattgataggaattagattggatttcgatcaagtttggtagttccaacacttctttaatccgtgcatagcttctacgtgtccgatgtttaccgtaattgactaagtgtcctgccaaattgttcacccctctataagttttccgcagtacttaatgttacaaaaatgtgacaaagattaaaaaaagattacattgccatattttcgactttttaagcagaaaaaaaacaaaaatagttgatttgcttgattaaaatcagcctcactatttttgttttccatgaataccgtgctggacaatagatcagcacaataaatttttctacggattttcgcagttacttgataatataccttatttcctataaaaagtcaatcactgacgctcgtcgaaataggccaatgctttgcccccataaaccgtaccaggaccacccgacatcataactgctgtgttgatcgtttcgatcacttcatcccgactaacgccttctttaatgaggcgattcatatgactgagtatgcagccttcacaccgagtcgcaatcgcaatccccaatgcaatcaattctttttccttcaccgttaaggcaccatctttgacgttagccttgtgcaagtcaccaaacgcccccatcacttcgggcgacgcttctttgagtgccgcgtattccttcttaccggtttgtgcctgttctgaataagtcatctgaatacctccttgttttaataactctactataacaaagaaaccgtttttagcagtctgatatgcatttttacaatttcatcacattacttttaccatctttacagtaattacgggtcaatctttacactggctcgctatacttttgtttgtaccttaattcaggctgggaggcttaattatgaagagaataagcacagtattactatcgatcggcactatcgccctcttattagcgggttgtcaaggcaaacaagcaagtcaaggtgattctaaagcacagtcggctaaaatcacagcggttggatcaacggcactgcaaccccttgttgaacaagctggggcaacttatcaaacaaaacacgctggcatcgatatcactgttcaaggtggcggttccgggaccggccttgcacaagtcagcgatggtagtgtcacaatcggtaactctgacatctttgcggaagaaaaagccggtatcaacgctaagaaacttgttgatcacaaggtcgcagtcgtcgcaattgcccccgtcgtgaacgaaaaactcggtatcaaatcattaacacaggcacaactaaaagacatcttcactggtaaaattaagaactggcacgcagttggcggccctgaccaatcaattaccgtcgttaaccgcgcacaaggtagcggcacacgccaaactttcgaaaatctcggtcttaaaacgaataaagtcatgaccagccaagaacaagactcatctggtactgttcaaaaaatcgtgcgtcaaacacctggggccattagttaccttgcctttccttatattaaggatggtttgaaagctgtcgcacttgataacgttcaaccaaccactaaaaacgtcctcacgaaccaatggcctatctggtcttacgaacacgcttatacaaagggtgcgcctaattaccaaacggctaaatttatccattaccttcaatctaaagacgttcaaaaaacacttgtgccaaaactcggttacattccaatgactcagatgaaagtggaacgacatgctgatggtagcatccaagacgttaaataacgcttctaaaaagacggctaatcttagccgtctttttatattggtatagacaaaaatattaagctaaataataaacttaacatttaatcgtaaaattggtataatttaaactatcagtttatggaggagtcttattcatgataaacaataaaatgaaaacgctatccgataaatacccaacaaaaatggccgtcacttctgaaatcatcaatctcaaggccatcttaaacttgcctaaaccgaccgaggcctttatgagcgacctccacggtgaatacgatgctttccagcatcttattcggaccggcgctggtaacttacgccaaaaaatcaatgaactcttctctggtgagatgacccccgagacgatgcaggccttcgcttttctcgtctactatccaactgaacgattggcgctcaaacaccaggccctctcagagaatgaattaaatcagtggtacctgacgacttttaaacggatgattgacctgcttaaattcgtttcaacaaaatacacacgttctaaagtccgtaaagcgatggcccccgacttcgtctacattaccgaagaattaatgtacggcgatgtcgccaacgttgataaaaagcgttacttccaagaaattaccgcgaccattattgaattaggccaagccgacgcgttaattatcgccacaagtcacacaattcagcgcctcgttgttgaccaatggcacatcatcggtgatatttacgaccggggccctcatcccgatttgattgttgaccagttaacccaattgcctgcggtcgatgtccaatgggggaatcacgatattttatggttcggtgcagccagtggttctgaactctgtttactaaacttattgcgaatttgtgcccgttataataacctcgcaatcattgaagaaacctacgggattgatttaagcaacttggtccgttttgcggcccaacactatcaggccaatcccgccttcatgccggttgaagatcccaaccaaggcccgctgacacgtgcggaaaaactaaaaattagccaggtccaacaagctttggctatcatgcaattcaaactcgagttaacggtgattaaacgccatcccgaattcaacatggatcaccggctcctattgtcgcaagtcgattttaaacgccgcatcttgcacctcaacggacaggaatacccactagaaaacacctgtttccaactggttgatcccgagaaccccgaagctttaacggcggaagaaagccaaatcatcgcggatttactggccgccttcacgcgctgtcagaagttacgcaaacacctgacctttttaattgatcacggtagtatgtaccgcatttacaatcaaaacttactcttccacggctgcttgcccgtcgatgctgaagggcacttcctgacattgaccctcgctaatcaacactatgccggcaaacagttactcgatttcttcgatcagcaaattcgctcgagctttaaccaccccttacaccaagcaaacctctcgacggatttattgtggtatctatggacggggccgttgtcaccactctttggtaaaaacgcgatgacgacctttgaacgttacttctgcccagatcccgaaacccacgttgaaactaagaacgcctattacagtttgcgtcacgacgctgattttattcagcagctccttagcgaattcaacctttctcctgaaaccggccatatcctaaacggccacacgccggttaaaaaaggccacgaccccattatggccaaccgccaaatgattgtgatcgatggtggcttttcaaaagcttaccaccacacaactggtatcggtggctttaccttactctataattcttacgggatgcagctggtgacccaccaacccttcaccaccaaggcggatgcgattgctaatatgaaagacatcatctcaacacggcgagtcatcgaccaagttagccaacgccaacgagtgagtcaaaccaatatcggcgcagccatcaaaaccgaaatcgaacaactccaaacattactaacgattcaaccggatcattaataacactaaaaaaacgccccgacaaaatcaatttgtctgggcgctttttaatgttgctggtactcacttttatttaacagttgttttttcttttttactattaatggtaatttcacctttggtagccccaattgtcactggtgtatcagtcgtgatttcaccagccaataaggcttcactcaagcgatcttcaacttgcgtttgtaatgcacggcgaattgggcgcgcaccgtattctggatcaaagccggctttagccacaacatccatcgctgcagcagtcatcttgatcttgacaccttgttccgctaagcggtttaagatgcctttggacataatcttgacgatttcacgcaattcaggttgtgttaatgaatggaagaccaccgtttcgtcgattcggtttaagaattctgggcggaataacttcttcaattcttccaaaatccgaccttgcattgctttgtaatcggcagtgacatctttgaccccaaaaccaactgacttgtcatcacgtaaggctgttgcccctaagttagacgtcatgatcatgattgtattccggaaatcaactttccgacccttagaatctgtcaaataaccatcatctaagacttgtaacaggatattgaagacgtctggatgagccttttcaacttcatcaaaaagaacaacggaataaggtttattgcggactttttcagttaattggccaccttcgtcataaccgacgtaaccaggtgctgccccgactaaacgactcgtactgtaacgttccatgtattctgacatatcaacccgaatcaagttgtcttcagacccaaacatggcttctgccaatgctttggccaattcggtcttcccaaccccagtagggcctaagaacataaatgaaccgattgggcgcttaggatccttcaaaccactgcgggcccgacgaattgcacgggccacagctgaaatcgcttcttcttggccaacaacgcgttcatgcaagactttttcaagttgcaacaagcgttcgctttctttacgttgcaattgagtgactggcacacccgtccattgggcaacgacttgtgcgatatcttctggttggacttgaatatctgtccggacaccattttcttgttcggctgcttggcgcttagccattttagccttagcaataatttctttttcgtgaatggcagcggctttttcaaagtcttgtgcaccaactgcgacttctttttctttcgccaacgattgcaattcagtttctaagcgatcgattggtgatttttggttaacagcatctaatctgacctttgcagccgcctcatccatcaaatcaattgccttatcaggtaagaaacggtttgtgatataacggttcgctaaaataacggcttcgtgtaatgcttcatcagaaattgtgatgccgtgatgttcttcataacgtggtcgtaacccgtgtaagatttgttccgcatcttctggtgttggttcatcaaccgtcaccgtcgcgaaacgccgttctaaggctgcatctttttcgatgtatttttggtattcatcaagcgttgttgcaccgattaattgcaattcgccacgggcgagggcgggtttcaagatgtttgaggcgtcaattgcgccttctgccccaccagcaccaattaaggtatgcaattcatcgataaagaggattacttggccatcttcatggatttcttcaataatcttcttgagacgatcttcaaattccccacgatacttagtgccagcgactaatgagcccatatcaagcatcattaaccgtttttgttgcatgtcgcttggcacatcaccgttgataatccgttgggcaaagccttcagcaatcgccgttttaccgacaccgggttcgccaattaaaactggattatttttagatcgacgcgctaagatttgcacgagtcgtttaacttctgaatcacgaccaacgactggatcaatttgattttcgcgggccatttgggttaaatcgcgtgccaattgattcaaagtaggcgtgccttcttgatcaacctttttagcactggctttagcgcgtttcttagcagttgcagcatcaatccccatcttttggagtaataattgacgtgttttggctaaactgaggcctaagtttaatagaatacgggccgcaataatgtcatcatcgcgtaataacgctaataataggtgtgccgtcccgattttaactgagttagcttgttgtgattcaacgcgcgctaaatccagcacttgtttggctttaggtgagtatggcaaatagccgcccacacccatggcaacgattgaatcaccataaccggttaagcgttcaatttcttccaagacatcagtgggtgtcacaccgagttcacgtagtgcgttcccagcaatcccttcgctttcgaggacgagcgctaataacagatgttccgtccctaatgcatgatgattaaacttcttagcttgttcttgcgctaacattaaaacgtttttggcacttggtgtaaatagattattcatggataatcccccactctttacttaatttcgtaacgtaatctttctaagacagcaattagcattcgtgcgcgtaattgctcttctaactgcttatcattgacggctaatgtctgcgcatttagcattgctaataccaaattcccctctttttgcgataaaatctgctcatcatagagtttttggataatagctaatgtatcggcttgcgagattcgatcctcaacactaccaatcaacgcttctaaaaagtcgcgatcatctaagaattgaaccttaacgatgcgaatgtagccgcccccgccacgcttactattgacgacataccctcgttgttctgtaaaccgagtattaatcacatagttgatttgtgacgggacacagttaaatagtttagcaatttcggagcgtcgaatttcaatctgctcgctgtcagccaatattttttttaaataggcttcaataatatccgagatattctgactttgcaaatagatcaatccctttttttcattcttcagcgcttataattcagtctaaaaatttaactttgactaacgttgactattattataacgattattcgttcaaaaggaaagtttgaagaactgcacaaaaaaagacttgttcgacaacaagtctttgagagtcgggaaaacaagatttgaacttgcggcccctacgccccgaacgtagtgctctaccaaactgagctacttcccggagagttatttaattatttacgggtacaaaaaaagcggaagacgggattcgaacccgcgacccccaccatggcaaggtgatgttctaccactgaactacttccgcattttttattaactttttgtatccagttgtaacgtaagttacatgttataaatttaagttttttggcggtgtagctcagctggctagagcgtccggttcatacccgggaggtcgggggttcgatccccttcgccgctattttcaaaaaacttggacctttagctcagttggttagagcagacggctcataaccgcccggtcgtaggttcgagtcctacaaggtccatcgtttggtgagattttgtaggtggttataatatttttatattatcgcgggatggagcagtctggtagctcgtcgggctcataacccgaaggtcgtaggttcaaaccctactcccgcaattggtcgcatggtctagctggttaggacgcctgcctgtcacgcaggagatcacgggttcgagtcccgttgtgaccgtttaaatggctcagtagctcagttggtagagcaatggattgaagctccatgtgtcggcagttcgattctgtcctgcgccatatcatgaatatgcgggtgtagtttagtggtaaaaccacagccttccaagctgttgtcgcgagtccgattctcgtcacccgcttttcatgggcctatagctcagctggttagagcgcacgcctgataagcgtgaggtcgatggttcgagtccatttaggcccattatctaaatatttggagaagtactcaagtggctgaagaggcgcccctgctaagggtgtaggtcgggaaactggcgcgagggttcaaatccctccttctccgttttgtatggcccgttggtcaagtggttaagacaccgccctttcacggcggtatcatgggttcaaatcccgtacgggtcattgtaacattgttacatttatagtttttatggagaattacccaagtctggctgaagggaacggtcttgaaaaccgtcaggtgggttctgcccacgcgagagttcgaatctctcattctcctttatattatcgcgggatggagcagtctggtagctcgtcgggctcataacccgaaggtcgtaggttcaaaccctactcccgcaatttggtcgcatggtctagctggttaggacgcctgcctgtcacgcaggagatcacgggttcgagtcccgttgtgaccgtttcaaaatggctcagtagctcagttggtagagcaatggattgaagctccatgtgtcggcagttcgattctgtcctgcgccatttttggaggagtagcgaagtggctaaacgcggcggactgtaaatccgctccttcgggttcggtggttcgaatccactctcctccatatttatagggatatagtttaaaggtagaactacggtctccaaaaccgtcagtgtgggttcaattcctactatccctgtttatattatatgttgcataaacattgcaactatggtataattattcatgttaataatggcggtattggtgaagtggttaacacatcggtttgtggatccgacacacgtgggttcgattcccacataccgccttttattattgggctatggccaagcggtaaggcaacaggttttgatcctgtcatgcgttggttcgaatccagctagcccaatttcaaggacaggatttgttcttttatggcggtatagccaagtggtaaggcagaggtctgcaaaacctttatcaccggttcaaatccggttaccgcctttgcgtttaggcgctaaccttaaacgttctgtaagatgccggtgtggcggaattggcagacgcgcgggattcaaaatcccgtttcctcacggaagtatcggttcgaccccgatcaccggtataatggattattatacaagttttaaaagccctagtaatagggcttttttgttgtctaaaaataagttattgtcgtgtatgaaagtggtgtgatacgatagggatatactaagcacatcaaaagggtgatcaagatgaagaagtggggctttttacttagcggtggttttttactggtcattattttaagcatattactgattaatcagcgttcaaatcaagcacgacagcaggctaatcgtgttcgtgacagcgcaccgaccttttatttacatgggtatggtggttccggtcgctctagcgatagcatgattgaggccgcagaagagcggggcagagcgactaaagtgttaacggcaattgtcagtcgtactggacaagttgcgttagagggacattggacagatagtactacccggcccattattcaggttatttataaaaataatcggaatccgaattatcggcaaaatggtgaatggtttaaacgggtattgattgcggtcaatcgacaacatcattttaagcagttcaatgttgtcgctcactcgatgggcaatttaacgttagccttctacctagccaataatgcccaaaacaaaaaaatgccgcagttagctaaatttgtttcaattgcaggtcattatgctggtattatcggaatggatgatcgtgctaatcaaaatcatttagctaaagatggtcgcccgcagcagattaacgctacttatcggcaattaatgggattaaggcatagattgccaaaaaatcaggttcaattcttaaatgtttatggggacctatccgatggtagtgattctgacggacgcgtcagcaatgtctcttcgcaatcgttacgatatttagtggcgccaagggctaaatcatatcgtgaggttgaatttaagggacgtaaagcacaacatagtcagctacatgaaaacgaggctgttaataaaacggtgatcgattttctatggtaaacaaaaacagcggcatcaacttcattataagttggtgtcgctgttttgttgttcaagacggtattctttagcagcggttgttaaagtccctaataaggcttgttgagtcgctgagaagagttgtgtcttgcgataagctaatgagatataaaaggttggttgcggttgatcaagtaagtctaaaacaataagatcatcagctggtgtgatggccgtttcagttaaaaaaccgactccgacattttcatggaccatacttttgaggatgctcacgtcattggtttgataaataatgtcagggttcatttggttcatcgtcgaaagcgtatcaaagacgacggggtggacgaagccctctgccaacataatgaagttttcgttggctaaatcacgaaaggcaacctttttagcggttgctagcggtgatttggggctgacgacgattttgaagtgatgttgctcgataatctcagccgttagcgcatcattttctaatggggttgcagagccaagtagggcagcatccaaacgtccagcttctagactagctaataattcagtagaaccaccatcaactgtcgcaaaatgttgaatactcccagccttgactaatttctgcgctaatttagagaagtagtaggtgccgataatcggcggaagtccaaaacgaagctcagttgcagagagattttgcatatcattagttgttaattgaatttcatttagaatgttgacagcgtgtcgattgagttgttcaccgctatccgtaataataattgattgatgggactggtcgcggcgaattaatttagtgtcgaattcttcttctaagcgcttgaccgcataggtgattgttggttggctgacaccaaattgatcggcaactgctgtaaaattttttaatttaattaaagcgacaaaatattctaaatctttaatcttcatagaaactcctatttaatgcgatttgaaaagctcatataaatctattttatcatagttgtaagttttgactatcaaatattactcgcgttacactgggttcatcgataagacgtaaaggagatttttaatatgaaagcacaacaaattttaaatgatccatttttaaataaaggcacagcattcactgctgaagaacgtgcacaatttggtttaacggggatgttaccacctcacgttcaaacaattgatgatcaagttaaacaagcttatgcacaatatcaatcaaaagctaatatgttagaacaacgtattttcttaatgtcaatttttaacgaaaaccgcgttttattctacaagttattcagccaacacgttgctgaattcatgccagttgtttacgatccaacgatcgctgacacaatcgaaaactacagtgctttatatgttaacccacaacacgcagcattcttatcaatcgacgatcctgattcaatgaagacaacattggcaaatgctgctgatggtcgcgaaattaaattaatcgttgtgactgatggcgaaggtattttagggattggtgactggggtacacaaggtgtcgatatctcagttggtaaattaatggtttatacagctgctgcagggattgatcctagccaagtattgccagttgttttagatgctggtacaaaccgtgaaagcttattaaatgatgaattatacttaggaaaccgtcatgaacgtgttcgcggcgatcgttactacgatttcgttgatcaattcgttcaaaccgctgaagaattattccctaacatgtatcttcactttgaagattttggccgtagcaatgctgctaacatcttgaacaagtacaaagatcaaatcgttactttcaatgatgatatccaaggtacagggattatcacattagctggtatcatgggtgctttaaatatttctggtggcaagatgacagaccaagtttacatgagctttggtgctggtactgccggtgctggtattacacaccggatcttcgaagaaatgttacaagaaggtttaactgaagaacaagcacgtagccgtttctacatggttgacaagcaaggtctattgttcgatgatgatccagagttaacaccagaacaaaaaccatttgctcgcaaacgtagtgaattcgctaatgctgatgaattaacaacattagaagctgctatgaaagcaatccacccaacaatcttggttggtacttcaacacaacctggtacatttacagaatcaatcgtgaaggaaatggccgctcacacagaacgtccaattatcttcccattatcaaacccaactaaattagctgaagcaactgctgaagacttaattaaatggactgatggtaaagccttagttgctactggtattcctgccgcacctgttgaatacaacggtgtcacatacgaaattggtcaagcaaacaacgctttagtatacccaggtcttggtttagggacaatcgcttcaactgcaaaagtcttaaatgacgaaatgatcagtaaggcagctcactcattgggtggtatcgttgacccaacagaagccggcgcagccgtattgcctcctgttacaaaattagatatcttctcacaaactgttgcgacagctgttgcacaaagcgctgttgaccaaggtttgaataaagaagaaattactgacgtgcaaaaagccgttgcagacatgaaatgggaaccagaatacaaagcactataatttaaatattaatttggtaggagagtgaaagagttggcagcatttctaacatcattatcaagtgtcgtcgaaatcgtcttagtcattgctttggggttttggctacggagttctaaaaagttcgatgataactttaagggtacaatttcatttttaatcatgaacgttgctttaccattatcaattttcgtttcagttctagataacttaacacgtgaaaagttggtcggtttatctggcggcttaatctacgttttaattagtttcgccctaggttacttagttgcttggttattaacaaaggctttccggattcgtccaggtcgtcgtgggacatttatcaatatgttcgttaatgccaatacaatcttcattggtttaccattgaacttggcactattcggtgacaagagtttaccttacttcttgatctactatgttgctaacactgtttcaacatgggcaatcggtgtcttcttcatctcaaatgatgatcctacaaaagaaaaaggcgctgctaaaggcaaatttaactggcgtaaattattaccttctccattaatcggtttcttagccgcattaatttatcttttaactggtttaccattgccagaacttgttgataagacattctcaatggttggtgggatcgttacaccaatgtcattgatctacattgggattatcttagctgatgctggtttgaaatcaatccatttcgaccgcgatacaatcttagccctattaggtcgcttcgttgttgcaccagcaatcatgattgcgattatgatgttcttcaagaatacaacttcaattccaacaattgaacaaagcacattaattattcaagccgcaacaccaggtttggctgtcttaccaatcttagtcggtcaatcacacggggacgttgaatatgcaacaaacgtcgttacaacaagtactgtcttgttcgtcgtcgttgtgcctatcttaatgcaaatcgttcaattcatctagtttcataataagagcgttagatattccgagtatctaacgttctttttttgtgtataaatgtgtaataatacacaatctcggttgataaacgaggctatctggactacaatgaaagcgtagtcaataaacaagagaggttgattaatatgtcagaaaagatttatacgaaacaagcgccagaaccattaggaccatacagccaagcaattgcaacggataagattgtctttatgtcaggtcaactggggttaaaagacggcaaactcgcacctgatttagcagggcaaacgaaacaagccattatgaacttacaaagtgttttaaaagaagctggcttaagtttagaaaatatcgttaaaaccaactgcttcttaaccaacctagatgactttaatgaatttaatcaagtttatgcagaatttttcggcgacattgcacctgctagaagtgctgttcaagtcggcaaactaccagctggtgggattgttgaaattgaagccatcgctgttcgataatatttgattgggagttggatcaatgaataaagtagccattatcggtattggtcatgttgggagtacagttgcctatacgcttgtttcccggcgcatttgtagtgaattagttttatttgaccaaaagccaaaattagcagaagcggaacgaaacgatttagaagccggtcaagttgatcatacaggatttgttaagattacagctaatgatgaaagtcaattagccacttgtgacctagtcattttctcagctggtgacattagtatccttgaacatagtgctgatcggtttgatgaattaacttatacgaaaacagcagtcgcacaatgggcacctaaattaaaggccgctaatttcaaaggaatcttattgaacatcactaatccatgtgatgtaattacccaatatctacaagctttaactggctttcctaaggaacgcgtattaggaactggaacgactttggatacagcccggatgcaagttgcagtcggccattatttgaacgttgcgcctaatagtgtgcacggctatgtgctaggtgaacatggtaattcacaatttgtcgcttggtctggggtgcatgttggtgggcaaccactagcaacccaattatcaccagaacaattggcacaatttgaagttgacgctcgccaaggtgcttgggaaatcctcagcggcaagggctatacgtcttatgggattgctaatcaagcagcgcattgtgctgcagctatcttacaaaatacgcgccaagtcttacccgtttctaactttgatgacactgtacaatgctatgttggccatccagctatggttggtgccgcaggtgtcttacaggattatccaagtcagttaacgacagcagaacaacaaaaatggcaaacatcgattgatacgatcaaacacatgtatgccgctatctaaatgaaaagacgtcatccaaattaatggatggcgtcttttttgtttaaaatagttgtcccaagaggaacatcatgagcggcaccatcaacaaagccccgagcgttgtctcggtcaccatgacagcggcaaaatcagcgtctgtattataaagtcgtgcgacaactggtgcatttgtcataacgggcatacaggattgcagaatgaagacttgtttcatgaggggtggcatgtgacttggatagactaacgcagtcattaataaaggcgcaaagatgaaccggccggctaagacacctagttgatctttgccaaagcgaatatttttgagtccggcattataaattgaaatcccaatgaagagcatggatagtggggtggtcaggttgcctagataagtgaaggactgtgttaagaaactgggtaagtgccaatctaataagaccaggataacgccgataataaaaccgattagtggcgccgagaaaaccttctgtaaaacagttttaagggataaaccctcttgattggcaccatctcgttgaattaagtaaacgccaagtgtccaaaaaatggtggtattagccatgtaatagactaagacaaagggcagactgcgctgaccaaagagggccaggttaattggtaagcctacaaaaaccgtattggagttgaagaacatggattcaaacaagccacgccgactggcatcgactttaatgaggcgtgcgacaataattgaaatcccaaacaagagtaacatggagagcactggaaaacggaggttgggaagtaaggtggctaactgatcgtgtgaaaagtctttggtgattgaaatgatcatataaggtggtagagcaacttgtgtgacaagtttagcgataagcgctgtgctatcctcattaaaccaatgacgtgcggctaaggcatagccaaccgcaatcataataatgataataaaaacaccggcactactattaactaaggtttgcataataagcttctttctatctgaaaatcgttctcctattagtataaaacgattggggatgacttaaaagtgtctctagtaggatgctatttggtcaataagctgaatagttcgtgttttaatatgtgtgttgaataaggggtggcatttattgactaaatcacgtataatcaatagaaataaagcggaataggggcgaaaatattgattttaactgaaacaacattagcaggaattcattttgataattgtttaatgaatgcagcaggcgtttattgttatgacgcagacgaactaaatcagattcaaaaatctgcagcaggcacttttgtaacgaagagtgctaccgtggtcccaagggcggggaatccagaaccacgctatttatcaacaccttgggggagcattaattcgatgggacttcctaataagggattaccctattatctcgactatgtttctcaacaacagaccctctttcctgaaaaacgatattttcaatcgattactggatttaatatcgatgaagacgaagcgcttttgaaacagattacggattctgattttaatggcttagtggagttaaacctttcttgccctaatgtgccgggcaaaccacaaacgggttatgattttgaaacagttgaacaaattttaacacgggtgtttgaagtgtatgaaggactactaggggttaaattaccaccttattttgatattgttcattttgatcaaatggccgccattttaaaccaattcccattggcattcattaattctgtcaacagcatcggtaacggcctcacgattgacgctgctaccgaacgggtcagcattaaacctaagcatggttttggcggtattggtggtgattatattaagccaacagccctcgcgaatgtccacgccttttaccaacggttgaaacccgagatccaaattatcggcactggcggtgttaagtctggtcaagatgtttttgaacatctattatgtggtgctagcatggttcaagtcgggacggcacttcacaaagaaggcccacagatctttgaccgcttaacggcagaactacaaacaatcatgcaacaaaaagggtataataaaatagctgattttaaaggcaaattaaaatatttagattaaagagagtgattagcaagatgcaatataaacatttatttttcgacatggacaataccttatttgacttcgatgcggatgaggaccaagcattagagcggctatttaacgcacaagacatcgacttaacgagtgatattaaaacaacttatcaaacgttcaaccaaggattgtggcgtcaatatgaacaaggggaattaacccgggaaatattattgaacacccgttttgcgacttttttcaaaaaacagtttaataaagtggtcgatggtcaacaattatcaagccaatatttagataatttggcattagggcacgatttaatgccacaatcagaagagttattagctgggttacaagcacaacacgccaaattatatatcacaacgaatggtgtggcgcgtacgcaataccaacgactacaagactcagggttggcccattatttcgatgctattttcgtatcagaagaattaggctatcaaaaaccggacccagcttattttcaaactgtttttcagaaattagaaactgtcccaatgacccagtcattgatcgtaggggattcactgacttctgatgttcaggggggccaaaacgtgggtgtggcaacagcttggtacaacccaacagggcaaatcaatcatgatcgggctttacagccaacacatgagatcaaacaattaacagaactattgacgctttaagcgtgacaatcaaagcgccaaccgttagagtgcgttaaaagatggagtgacaagagatgaaaaagcaacgttattttagaattagtttaggctggcggattttaatcgggattgcactaggattagttgccggtgggattttctaccaaaacaaaactgcaattgcggtgatgcaagcgatagggacgttgtttattaatttaattaagatgattgtattaccaatcgttgtttcttgcttggtagtcgggatcgctaaaatgggcgatatcaagaagttgggtcgaattggtggcaagacgcttttgtattttgaaatgatgaccaccattgcgattgcattaggattgacggtcggtaacttgacgaaacctggcgcgttaatcaacatccatagtttgagccaaggatcaattggtcaatatacagctgctgctaaatcagctagcaatcatggtttgggcgatattattatgaatattgtaccgactaacatttttaaggcgcttagtgaaggggatatgattccaattatcttctttacggtcttgtttggtttaggacttgcaacatttggcaaacgcagtgaaccgctcattaacgcttttgaaatgatttcagaagtaatgttcaaactaactaactggattatgcaattagcaccaattggggtttttgccttaatcggtgtgacgattgcccaatttggtttcgatgcattgaagcctttggtttatttcttagtcatttgctacttaacgatgattttcttcgtcgtcgttgtggcggggctagtggcacgaatctggcatattaatatcttggaattattgaaagtcttcaaagaagaattagtgctatctttttcaacagccagttcagaagctgcattacctaaagtaatggaaaaaattcaagattacggtgtgagccaaggaattgcttcttttgtcattccaaccggttatacatttaatcttgatggttccgcaatctatcaatcattagcagcgctctttttggcgcaagcttaccacattcatctcagtctaatgcaacaactaacactattggtggtcttgatgattacgtctaaagggatggccggtgtacctggggcttcatttgtggtattacttgcaaccattacaacaatcggagtaccagctgctggtgtggcctttattgctgggattgatcggttagtcgacatgggccggactgccgtcaatgtgatgggaaactcattagcagccgtgattatcgctaaatctgaaaacgaatttgacgaaacaaaacgaacgaaatacttagcgcaattaagtgctaaaaaataacaaggcttgatagtagtcagccgaccaaaaaaggactaggatagaaattgtctcctagtccttttgctgtatctgggtatagaccggtctatgattgattcgagttaatgggacgtatttaaataagctatattgaaatgttgttgtcgttaaatacttgagaacaatgtatgtttatgaaaacggataacaacggcattatctagaccaatttcacagataacgtaaaaatgattagacagattagagatttgtggtagaataaatgagtaaagcgttttaaaaagaaaaacgttttggtgtgataatagattgatagggattaatgccataatatttcattataattgttagcgtttttatcagtgtgttattacaactattttataaggaggtttttgtgaatggttggaatcgttattgcaagtcacggggagtttgctaaaggtatcatgcaatctggttcaatgatttttggcgaacaagaaaaagtacaagctgttacttttatgcctaatgaaggaccggatgatttgaaagcgcatttagaagctgccgttgcaacgtttgacgcagatgatgacgtcttgttcttagtcgatctttggggaggttcaccatttaatcaagcaaatggcttgttcgaagctcataaagataaatgggcaatcgttactggtttgaacttaccaatgttgattgaagcatacgcatcacgtttatctatgacatctgctcatgaaatcgcagcacatattattgatgaagctaaggctggtgttcgggttaaacctgaagacttagaaccaaaagaagcaccaaaggcagaagcaaaacaagctgctaatacaggtactcctggtaagttcaaatatgtcttggcacgtattgattcacgtctattacatggtcaagtggcaacaacttggtctaagacaactaacccaacacggattattgttgtttcagacaacgttgctaaagatgaattacggacaaacttaattaagcaagctgctcctggtggcattaaagcgcatgttgtgccaatcgatcaaatgatcaagttggcaaaggatgatcaacattttggtaaggaacgtgctttattattattcgaatcaccacaagatgcactcagagccgttgaaggtggcgtaccattagaaacaattaacgttggttcaatggcccactcaactggtaaagtacaacctaatactgttttggcctttgaccaagatgatatcgatacatttgaaaaactaaaggaaaagggcatcaagtttgatgttcgtaaggttccaagtgattcaaacggtaatatggatagcatccttaaaaaggcacaatcagaattagacaaacaaaacaataaataattaactatcagaagaaaacggaggattaataatcatggatttgaatttcattcaagtgattttggtcatttttgttgcatttctagctggtgtggaaggtatcttagatcaattccatttccatcaaccagtaattgcttgtacattaatcggccttgtaaccggtaacttattaccatgtcttatcttaggcgggacattacaaatgatcgccttaggttgggctaacgttggtgccgctgttgcacccgatgctgctttagcatcaatcgcatctgcaattattttagtacttggtggccaaggcaaagccggcgtcacatcagctatcgctattgctgtacctcttgcagtagctggtttattattaacaatcatcgtacggacattagcaacaggtatcgtgcacatcatggatgctgctgctaaagaaggtaacttccgtaagatcgaaatgtggcaatacatcgctattatcatgcaaggtgttcgtatcgctattcctgcaggcttaatcttagcaatcggtgctggccctgttaaagaaatgttgacagcaatgccagtatggttaacagatggtttagcaatcggtggtgggatggttgttgctgttggttacgcaatggttatcaacatgatggcaactaaagaagtatggccattcttcgcaattggtttcgtacttgcaactatctctcaattgacacttatcggacttggcgcaatcggtatttcactcgctcttatctacttagccctttcaaaacaaggctcaggtaataacggcggtggctcaaatactggtgatccgctaggcgatatcattgacaactactaagaaggaggctgacaaaaaatggcagaacaactaaaattaacaaaaaaagatcgtatctctgtttggttacgttcaactttccttcaaggttcttggaattatgaacgtatgcaaaatggtggttgggcttatacattaatcccagcacttaagaagttatataagactaaagaagatcgttcagcagctttagttcgtcacatggaattctttaatactcatccttatgttgctgcaccaattcttggggttactttagctcttgaagaagaacgtgctaatggtgcaccaattgatgatgttacgattcaaggggttaaagttggtatgatgggacctttagctggtatcggcgatcccgttttctggtttactgttaaaccaattatcggtgctttagctgcttcacttgctatgagtggtaacattcttggcccaatcatttatttcgttgcatggaatgccatccgtatggcatttacatggtacacacaagaattcggctaccgtgctggttctaagattactgaagatttatctggtggtattttacaagatattactaagggtgcttcaatccttgggatgttcatcttgggatcactggttaatagatgggtatcagttaagttcacaccaactgtctcatctgttaaattagataagggtgctttcatcgattgggataaattaccaagtggtgctaaaggcattcaatctgcattacaacaacaagcacaaggcttgtcattgacagatcataagattacaactttacaagataacttagatagcttgattcctggtttagctgcattaggtttaacattattctgtatgtggttacttaagaagaaagtatcaccaatcgttattattcttggcttattcgtagtcggaattgttttccatctattacacttaatgtaaaagagtgcgtaagcaggtgtttatattttgaggattaactggatttgacgaattggggctgaaagtaccgatttggcaaatttggttaaccgcagaaatatgcctgctgaagcacgtttaaaaaaaagtgcgttcaagcttggtcaacttttgagcattagcatagggaagcgaatgagcgacgcagtcgattatttgattcacgacgctaagcacagaaagttagcttgaaaagcacgttaaaaaaacaaaggaagggctagggcaaatttactttgtcctagcccttcctttttataaaagcgtataatgaaagtaagctttttggaaatggagtcgatataatggttcaatcaattaatacaaaggtcgaattagtgatcaatgcgacctcttttactgcgttaacagattacggcaaaatcatgattggcgataagggctttgaattcttcaatgatcgtgacgcccgtcagtttattcaaattccgtgggaagaagttgattacgtgattgcttctgtcatgttcaaaggcaaatggattcctcggtacgcaattcagaccaagaaaaacgggacctatacttttgcttcaaaggaacctaagaaagtgttacgcgctatcagagaacacgtaccagctgaaagattagtacaatcactcggtgtgtgggatgttattaaacgggtttttacgcgccgcgcaaaataaaatgttaaagtcagagacctaagataaatttttttatctcaggtctctttttgtgcaaaaaagggaaaattgcgactctatctagggcgtgctaaaataccatataaggttaatttatatccgatcaattaggatagaagaggggattcaaatgggattcgataaagcgattattgcgttaaaagcaggcaaaaaagtagtgcggacaggctggggtggtccagaactattcatcgttcaagttagtggcgacacgtaccaaggagaaacaatcagtccatacctattgattaaaacgactgaagaaccagcttattcaatgttccaaccaacttcttgtgatgtattagccgaagattggcagttagttgattaatgggtcattttgcggatttaaaacaaaagacggttttagtcactggcgccgcttccggtattggcaaggcccaaatgctagcttttttggcggagggtgcgatggttattgcattagataaggcgccgattacgcagacggcagacggtttaaaaacggtacaagtcgatattcgggacgctccccaattaacggcaacgttaaaaaatttgttagcgacagtgtcgtcatttgatattgtctgtaatacagcgggcatattggaccaatacacaccaacgcttgaaacaagtgaggctgattgggataatctgatggcggtcaatttgaaaagccagtttttagtgactaatgcggtactaccaagtatgctagctcgccacgaaggcgtttttgttaacatggcttcaattgccggattagtggctggcggcggcggtgcggcctatacggcttctaagcatgcgattatcggttatactaagcagctggattacgattacgcaagccaaggtattcgggcgaattgcatcgcaccaggcgcaattgaaacaccgatgaacgctgccgattttgcgggcgctggtgaaatggccaaagaggtggcgcgtcaaacgccagctggtcgctgggcacaaccggcagaggttgctcagttaagtttgtatttagcaagtcaagcctctgattacatccacggaaccgtggtaccaatcgatggtggttggcttgaaaaataacgaaaggcaaggtattagggatggcaaaacaaattaaacttagtcaaacggtttatgagttagtgactgcatatccagagattgtccccgtactcgtttcaatcgggttggacggtgtgacgaatcctgcattattgaacacagcagggcggtttatgacgttacccaaaggtgcgcagatgaagcagatcccactttcacaaatcgtggcaactttgacagaaaatgacttcgaggtgattgcggatgactgatcaacatagcagtgcgtaccggcaaaaaagaattgtcgaaattttaaagatgttacataacggcggatctttcgaggaagctaagcggattttcgatgaatcattttcaggggtcgatgtgtccgagattacgtctgctgagcgggaattaattgccagtggcttaaatcccatggaaattcagcatttgtgcaacgttcatgcggccgtttttaagggtgcaattaaccctaacggtgctgaaacaccagcacaagaacaaccggggcacccagtcgctgttttgaaattggaaaatttagtgatcaattcgttattagtggatgaattgttaccttgtcttaagaaatggcaacaatcgggttcagatcaagcttacttaaaccgaatgcaacaagcgctaaaagatttattgacgattgatcggcattattcacgcaaggaaaatctgttatttccattaatggataaatatggcatcactgcgccaccaaaagtgatgtggggcgttgatgatcaaattcggggtttggtgaagaccgtctatcaaatggtgatcagtgaaccggttcctgataaatatgaagttgaagcggccattgaaaaaatgaccaaggaaatccaagaaatgatctttaaagaagaagaaatcatggtgccaatggtcaatgaagtctttacgccagcggattggggcttgatggcagatgaaagtcaaccaattggctatacattgattcctgagccacttccttggcaaccgagtcaggctgatttagaggcttcagaacagcgggcagtaccagctatcgccaaggaattaaatgcgatggcgcaatctttagcagataagcaggcaccggttagtcgagtgctaccagaagtaaagacgacacccactaaattagaggcggctagccaaatcccctttgccattcaggggacacctgttgaaacacctgtaacacaagcaactgcggctgaacctaagtcagcagagatgcctgattttgtgaaggcgatgttggcggataaggcgccggctgagaagcggcctgctaaagtgagtcgaaatcgggaagcccctcaaccgcatatcgagattggaactgacaaccaggcaacaattgtattgccttcagggacaatgaacttgagtgagctcacggcaattctacaagttttaccacttgatttaacgttcgtcgatcaagacgatatcgtgcggtggttctctgataataatcaccgtattttcccaagaacgcgggcggtcctcggccgagcagttgttaactgtcatccaccaaagagtgtggataaagttgaaaagattttagccgattttcatgctggaactgaggatcacgccgatttttggattaacttccgcggtaaattagtgtatattagatatttcgcagttagagatccacaacaacggtatctgggttgtttagaagtcagtcaagatattaccgagattcaagcactaacaggcgagaagcgcttgtagtacatgctttaatggcatagaggagagagaaaagttatgcaacagattatattattattggcggtggggattttagccggtattttaggtgcgattctcggcattggtggcgggattatcctgacacccgttttaacactcgcaattggtttagacatcaagtacgcaatcggagctagtattgtcgccgtgattgccactagttctggtgcgacaattgcttatttaaaagacgatatgctgaatttacgggtggcaatgtttctagaaattgcgacaaccgtgggggcgattatcggggcgctattaaccggcgtcgtaccaaccggctttttattcattttgtttgggagcttcctattattctcaacttacaatatgattcaaaaactgcgtggtaaaaaggccgaagaacatgttggtgcagctaatgatcagtgggctgaaaagttgaatttaaatggcacttattacgataaggccaatcaaaaacaagttgattaccaagttgaaaaagtacctggtggttttgcgatgatgtttggcgccgggattgcctctggtttattagggattggtagtggagtcttcaaagtcactgcaatggataccattatgaagatgcctttaaaaccatctagtgcaacaagtaatctaatgatgggtgtgacggcagcggcttcagcaacagtttatttctttagtggtgcgatcctaccagaaattgccgcaccgttagcgcttggtattttagcgggcgcaacagttggttcaagaattatgcaacatttgcaaccgaagtttattcggatgatttttattccgattttactgtatatgggcttacaaatggtgcttaaaggattcggggtgcacatctaatgacagatcgtaaaaaagaaatggcgcaaattgaattagtaattggtaaaatcttacgggttggtgttttggtgtcagcaaccgttctaattatcgggatgattttattcttaatgcatggtggcacaggttatggcgaacaccaatttccaacaacctttgctatgatttttcaagggatggctgaattgaaagccggcgcggtcatcatgtttggtttattctgcttgattttaacacctgttttacgggttgtagtgtcaatctatgcctttgcaaaagaagaagactatctatatgtctggattacggtcattgttttggtgattttaatcattgggatgacgattgggtttatcaaataaaaaatacgtttaaacataaaagacccagggcaagagtaattcttgccttgggtcttattttggttattgatcttctaaacctaaaatgcgctttttcttttcttcaaattcgtcgtcggtcatcaggccgtcttctttcatcttgaggtaggccatgattagttcgccttttttgacgaaacttaaatcttcttcagctggcttttcgatgtaatcgttcatcagttgatagagtttttgcaagtcatcgttatcagcggcctcaaagctgatgataattttttcgagggcgtggttgggtttttgatagagaatttggagatgcccttgccggtaagtggcttcaaaaaaacgaacggattttaattttttaaaggcaatctcacgatcgtctttgtcatttttctttaagagtcctgggtagtgaagtgtgagaatttgatcatcataagtgatttcaagtttgcgtggcttcttaatgcgataagtctgcatatgactgctccttttaataaaacttaagtaaaagcaagaacgttcttaacaaacaacgtctaaacttacccctatcatagtagataataggcgtaaatagcaagtcttgtctttcgtcaaaaaatgaggtgattaggatgcaatttttcactggtattcgtaatggcttattactcgtgttacccatctggggcgtgttaatcttagtaatgagcagctggttatattaaaaggcaccaaaatggccagtcggttgttttgcgtgtcttttttagataattcggtcatttttaggtcttaagtcggtttttatgctagtatgaatagattacaattaagaacattgattgcatatgatttaattaattactataatggtatcaaatgtccaaagataaggaggaggaaaccaattgaatattggaatatttacggacacctactttccacaagtcagcggtgtggcaacctccattaaaactttaaaagaggggctcgagaaaaaggggcactctgtttacatatttacaacaactgatccacatgttgataaagaaacaattgaaccgaacattttccgatttgcaagtgtgccgtttgtgtcatttacggaccggcgaattgctgttcggggcctttttcatgcctatcaggttgctaaagaattagatttagatatcgttcatacgcaaactgaattttcgatgggttacatcggtaagtttgttgctaagaacttgaagattccgtgtctgcacacgtatcacacgatgtatgaggattatttacattatgtgttaaacgggaagctcttgcgtccttatcacgttaaacagatgagtaaggcctttttatatcacatgtcggggattgtggcaccgtccgaacgggtgtcacagacgttgaatcgttaccaggtcaaagcgccgattcggattattccaaccggggtcgatattagccggtacgaaaaacaagtgaccttggatgtacgggaatcactaggtctaacgaaagaacaacccgtattgttatcactcagtcgggtcgcttatgaaaaacggatcgatgttattatcgatgcgctaccacgcttggtggcgcagaaaccagatttaatgttggttattgctggtgaaggtcccgcgcgtgaagacttggaagcacaagtcgctagattagggatgagcgaacacgttatttttaccggtatgattgataacgatgatgtttctaattactatcacatggcagatttattcgtttcagcgagtgattccgagtcacaagggctaacgtatattgaagcaatggccgctgaagtcaaaattgttgtgatggccagtccctatgccagtgaattattgacggatccgtcaattgggacgacttttacaaccgaagatgaaatgttgcatcaaatcttgaactatttgaatcatccgggggcttttgatgacccagcaccacggcaaaataagttgcacgcgatatcggcagattattttgcggaacaaatggttcaattttataagcaatcacaagtgttatacgatgaactgaaactagatcaagatgagttgttagaattagaagatatggatactaaaaaataaatgacataattgaagaaactgttgatcataatcagcagttttttattggtcaatgatcattagaaaaagggtcggttatgagtcgaacaaataaaattgtttttgcagtcatgttagcgattggctgcggcatattcgcttatgagagtcgcacgttacagttaaatcaattggtggcagatattagccggttaaaagtcggctggctactagtcgcacttttatgtatgttagtttcttggttctttgaagcattagtactgcgcgtctttttaaaggggcggacgacggatttttcattattcaacgccttgcggattccattgattgcgcagctctttaacgcgattacgccattttcttctgggggtcaacctgcacaactagtcgcactgatgcagtcacgagtggaagcgggccaggcgagttccgttttattaatgaaattcatcgtctatcagttcatggtgttggtcaacttcctattaagtatggtcatcggcttttcacaggtttccaagcactttggcacgctggcgattttaattaactttggtttgattgtccacgtcgttgttctagcggtcttattattggtgatgtactacaataaatttactaagcaattggtacattggttgttaattccggttagctggttcgtttccaaaaagcggatggctgaatggcgtggtatcctgttaactaaaattgatacgttttatgccgagagtctccatctcaaaaaggaaaagaagaaactcatcaaaggctgtttattaacgctatgccaactctttttctactatagtgtgccgtacttcgtgttattggcgttaggtagtccgaatgtgaattacttagaagtcatggttttacacgtcatgatcgtcatgattgtatcgctcttcccagttccaggtggttctggtggtgcggaatacagtttcaagactttatttgccacctttacgctgagttcgagtaaactggtattagccatgttgttatggcgacttttcacttattatctaggaatgtttatggggattggcgctttagcggtcaaacccaagttaagtgctaaaaaataggaggttattaacatgcaaccaacaatcggttttatcggtatcggtgtaatggggagcagtatggttaaaaatctattgaaagcaaactactcagttgtcgtttacaatcgaacgaaacaaaaggcagatgaagttgtcagtttaggtgctaagtgggcggacacaccagcagctgtcacggcacaaagtgatgttgtcttatcaatggttggttatccacaagatgtggaagcaatttattatggggatgacggtatttttagtgcggtcacgccagataaaattgtcgtggatatgacaactagtacaccaactttggcgcaaaaaattgcggccacagccagtgaattagggttacaagcattagatgcacccgtttcaggtggcgacatcggtgctcaaaatgggacgctaacggtgatggtcggtggtaatcaagccgcttacgaacaagttaagcccgtttttgaagcagttgggcaaaccgtacaacgtttcggcgaagccggtaagggtcaacacactaagatggctaatcaaattatgattgccggcacaatgactgggatgactgaaatgttggtttatgctcaggcggccggcctagatttaccagctgttttaaaaaccgtcaatggtgggagtgctcaaaattggagtctcgcaaattatggtcctcggattctagcgggcgattacacacctggcttttttgcaaaacatttcttgaaggatttgaagattgccttagaagaatctgagaaaatggggcttaatttaccagccacacatcaagccaagaaattatacgcaagattagtgaatgaagcgggccttggcgatgatgggacacaagccttgattaaattatggacagattctataaaataattgcatataaacggtgcagtcggggcctttttctgataaactggtagatagttattaaaggaggattcgccatgcaatcatcacagttagttgcgattatcaaacgtctggtagcaatgcaagaagatcaaagcgctgaggttcaagaaagacgttttgaaaaggaaggcgatttaaaagcgactgttagctatgatccacaagcacaagcctttgaacttgaagacagtagcacacatcaacaattccaatttgacaatattgatttagtcgcaatggaactatacgatttattagcagactagttaattaaccattgagtatcaaattacttggtggtttttttgctacttagggcgcttagcgctttatctaacagtcattgagattcttaaaaatgggttaatatttgaaactgcattcggtttcatattgatttttaatactgacatgtgtaaactaactgtcagattgtcaatagcttttaacgaagctaaatgacctttaacggaggctattgtatcgatgaaacagattggtcataaaattcaggccggattgagtacgcgctggggctttttcctatttgcggtggctttattctggcttaaaacgatttatgcgtatcaaacgaaatttaacttgggtgtcaaaggtggtatgcaagccttcttaatgacgattaaccccattccaacaaccttattgttatttgggattgcgctatttatgaatggccgcaaatcatacataacgttgatgattatcgatttattaacgtcagtctggttgttttcgaatattctctattaccgagaattttctgattttttaacctttaacttaatgaagggctcaggcgctgtttctaataacctgggtaagagtattgccggcattattgaatattccgatttcttagtttttgcggatgtgctgttattattaatcttattagcgactaaactaattaagattgatcggcgtgttttcatgaaacggaatgcttttgcgattactggattatcagtcgttttattcggcgctaacctggggatggctgaagcggatcgttctggattattaacccggacatttgataataactatattgttaaatacttagggatgaatgcctacacggtttacgatggtgttaagactactaagaataacgcgattaaggctaacgctgatagtagtaatatgagcggcgtcttgaaatatttaaaagaaaaccgcgtgtcacccaatgttgaatacacaggggttgctaaaggtaagaacgtctttgtcattcatttggaaagtttccaacaattcttgattgactacaagtgggatggccaagaggtcacaccaaatatcaataagctttatcatgatcaaaacacattaagctttgataacttctttaaccaagttgggcaagggaagactgctgatgccgaattaatgcttgaaaactcgttattcggtttacctgaaggggccgccatggttacacaggggacaaccaatactttccaagcagcaccagcgattttaaatcaacaaggttacacaaccgcatcattccatggggatgtcccaagtttctggaaccgggataatacctacaagtcatggggctatgattatttctttagctcacagtactttaaagaaggtaaggattacaatgttggctatggtttgaaggataagatcttcatgcaagattcagcccgctatattgaacaattaccacaaccattctatgcaaaattaatcacagttacgaaccactatccatacttattggataagaagaaccaatcgattgctaaaaccgatactggtgatgataccgtcgatggctatgttcaaacggctaagtatttagatcaagcactaggcgaattcatgacctggttacaaaagacaggcctggataagaatagtatgttggtcttatacggggatcattacggtatttctgggaatcataagaaggccgttgccaagttattgaagaaggatgaattcaacgactttgataacgctcagttccaacgggtaccatttatggtccatatgccaggcttaaaaggtggcgttaaccatacttatggtggcgaaatcgatgtcttaccaaccttattaaatctcttaggcgttaagaacacggatacgatccaatttggatctgatctcctagcggctaaccgtaatcaaaccgtggtctttagaaatggggattacgtggcaccagattacacgaaggtcggcagtacttactacgatacaaagacgggtaaggaattgactaagatgaccaaagcgcaaaaactccgtgtcttagcgcttagtgaacacgttacaaaggaactctcattgtctgataaggtgattaccggtgatttacttcgtttctatacgccaacaggctttgaagcaactgataaaacgaagttaagctataaggtcagtgatgctaaagcacaactgaaagctgataagactaaaacgagtgttatccaaaagaataatggtaaatcgacgatgaatctctatcaaacagatgcacctgaattgaaataagtttagaaaaaccagagtgattaatcactctggtttttttgctgcctttttacaatcattttacttgtcagagtcgttaaaaaaaggtacgattacatcaatcaatacacatgataatgattatcaattaagaaaggagcttatctgatatgagtcaaacaattgtggatcagacgcttcggaagttgaaagctaataatgtacgaattacaccgcaaagacaggctgttttagaatttatgattggcacgcacatgcatccaaccgctgatgatgtttatcaggccttagcaggacgctttcctaatatgagtgttgcgacgatttataataatttgcggttatttacagaactgggtgctatagaagaaatgacttacggggatgcttcgagtcattttgattttgcgcagaccaaacattaccatgcaatctgtgatcgttgtgggaaagtggttgatattttttacccaggactagaagatgttgagatagttgcccagaacttaaccggttttatggtgacgggtcatcggatggaagttcatggcatctgtccagaatgtcagttagccaatcgctaattaagtgaatttagtgaatatttagaaaaaaataaaaaagatgcattttttacttgacgatgattatagatgttggtatagtagtctatgttgtcagcgagataaaagatattcatccgataacaagtgatttatattaagaactttgaatatttattcaaaaaatatttataaaaagtgcttgacagctcaccatctgacgcttttttcgtttaaacgtgttctgtaacccgtatcctgagggttacgacgcactcttgatctaaacgtgctttttcaggcatattgttgcggttaactacgtcccgcaaacaatcgactgcgtcgcttattcacggtactaggttaagccttcacaatataaacacctgaaacgcactctttatttaaacgtgctttttgaaactgacttttgcgcttagcgtcacttgtcaaacaactgcctgcagcagttattcaccgagctgtgctaatgctcaaagtcaaaccgtttcaaacgcactcttaaattagtattcaccttgcgaatacgatatcgacgagaacttattataggttttaacgaataacagctttaccgtgccccgcgcgccggcccggtttttttcaataatcacttcgacttcaccgacatccgcattttccggatctggtgctggttgactaccaccatcttcgccgtcttcacctggttcatcacgataataatcatcacgatacaagaaagccacgatatcggcatcttgttcgattgatcctgattcacgaatatcagataatactggtcgtttatcctgacgttgttccacgccacgagaaagttgtgataaggcaattacgggaacccgtaattccttcgctaactttttcaattgccgtgagattgctgaaacttcttgttgccggttttcttgaccggaaccttcaatcagttgcaagtaatcgaccacgattaggccaataccatctttttccttcgctaaacgccgacatttagcccgaatttcagccattttcacgccgggtgtatcatcgatataaatattggctttcgacaaactgcccatcgcaataatcagattttgccattctgattcttctaattgaccggttcttaaatggttggcatcaatactgccttctgcacacaacatccggttaaccagttgttcggcacccatttccaaactaaaaatagcgacgttttcgttggtcattttgccgatattttgtgcgatattcaagacaaaggcggtcttcccaaccccaggacgagccgctaagataatcaattcatcttcatgcaacccagccgtgatcttatcgaggtctggatagcccgttgaaagaccggtaatactttcttcttcttgatagagcttatcgatatgttcaatcgacgtggttaaaacgtctgaaattgatttgaagccggctttattttgctgttcagaaaccgccataatctcttgttcagccgtatccaaaatatccgtcacgtcttcatcttgcgcgtaacccttggcgacaatattttgtgccgtttgaattaagcgtctaagcatcgctttttcagagacaatcttcgcgtaataaaccacgttggctgcggttggcactgcatcggctaattcagccaaatagccaatcccaccgatatcttccaattgattgcgggcatcaagttcactcttgatcgtcaccgcatcaatgccttcgccccgttcatttagttcaaccatcgtttcgaagattaggcggtgcgccttacgatagaaatcatcggcagtcacgtattccatcgcttcaactaatgcgtcgctattaatgaaaacagcgcctaaaaccgcctgttccgcttcattattctgcggtggcgtatgttcgattagttcattattcaccattttatctccttttggcttgtttgcgttattgcatctagtttacttaaatttctctccagatacaacctgtcaccataataaaagaccgtgactttgattgcaatcacggtcttttggataattaaaaaatttattctgcgacgatgtgcacccggattgtcgctgttacatctgggtgaatccggacgtcaacattgcgataaccaagcgctttgattggttctggtaaatcaattttacgtttatcaactttgattttgtattgttgttctaaggcttgtgcgatttgtttgcttggaattgaaccgaataaacggctgtcttcgccagctttagacttcacttcaacaattgttttatcgtcttcaatcttcgtctttaaaaccttagcttctgctaattcggcagcggcattcttagcttcagcgtgttgttggccttttaaagcactgacagcggctgttgtggctggtttagccttaccgtttttaattaagaagttttgtgcgtaaccatctggcacgtctttcacttggccctttttacctttaccgcgtacgtcttctaaaaaaataactttcattacgtttaccacctttttaattaatcgttagttgcgttttcttccgcttcttctggatcaaataattcggccagaacggctaataacttagctttggcttctgaaaccgtcgcatccttcaattgggttgccgcgttggataagtgaccaccgccacccagtttttccataatcacttgaacattgacgtcccctaaactgcgtgccgagatggcaatcatgccgtctgggcgtttcacaataacgaaggccgcttcaatgccggataacgacaagagcgtatcagctgcttgagctgcaatgacgggatcataactgcgattgtcttcccccatacataatgccatattgtcctcaaccatttcaatggtttcaatcaaatgattcttttgaatataattatcgacgttttcttttaacagatgttggaccattgatgcgtccgccccgacagaccgcaagtaactagcggcatcaaacgtccgcgtcccggtccgcattgaaaacgactgcgtatcaaccgtaatcccggctaacatcgtagttgcttcgaacttgttaatgttggccacgttttgtggttggtattcaaacatttcagtcactaactcacacgttgaagaggcgtagggttcgatataaaccaacattgggttttctgggaactcttccccgcgacgatggtgatcaagcacaattgtccgttgcgccaatttctcatacaatttaggcgccatcgtaatcgatggtttagaatgatcaaccattactaataaactgttagccgttgccttttccaccgcttcttcaggtgaaaggacttcgactgcaatttccggataaaccttaacctcttccaacaagcgttgaatatcggtatgaatattattttgatcaaccacgacataacatttcttgccgttcatttcagcaatccgtcgaatcccaaaggacgcaccgagcgcatccatatcaggccgaatatgccccatgacaaagattgaatcgacctgcttgaaaacttcctgtaaggcttgcgaaatcatgcgcgcacgcactcgagtccgtttttccatcgggttcgttttaccaccgtagaaccgggcttgcccatcgttggccttaacgaccacctgatcaccaccacggccaagggctaaatctaaattactctgagaagtcgtcgctaaaacggctaaatcagattccccataggcaaagccaacactcaaggttaacgggaagttttgttttgaagtttcttcacgaatctcatcgagaatcttaaacttctctttttcagccgcgtggagcgacttggcgtaggcgaggacgaagaaatgatcatcatcaacccgttttaagaacatttggaactgattagcccaccgagagagctcgttagtgacgtagttattcagattagaaatagcttgatcatccattgtttgggtgatttcgtcataattatctaaaaagacttggccgattgcgacttgttcgtcttcataacgatcttcaatcgccgcataacgcgtgatatcgagaaggtaaaccaccccgatactttcttggatgataatctggaattgattatcgccccagtgaacgagcttagtttcgttggaatcttcattttggacgactaattcggccaattccggatcgacttctttaatcgtttttccaaggacttccttattccccaagtattgttgtaaataaggattggtccattgaatttcgcctttttcattgtagagcaaaattccgattggcatcttgattaaggcctcttgttcgccccgtttaatccggtaggacaaatccgaaacatacttggcagtattttccgtgaccgtctcaatcgcgtacaagacggtgattaaggtcccaattaagagcacgaacaaaatcaaagcgatgagccaatttaacatccctgcaaagatcaggctgacggcggtcaaccctaataagactagggccaccatccgcaagcgcgcatcatctaaaaactgcggtaattttaattgcttaattttatttttcatgtaaactccttaactctaaagaaacaagtattttaggcagcacatcttgatttgaacaacttggttctttactaaatcttaaagaatcatactttattctagcacaaataccaattaaaaaccgctctcagcccgcaatttaatcccatgttcgcctcttggaaactaaaaaagtcaccaaccaagtaaacttggttgatgactctaaaattaatttttagtcttctgtaacgaatggtaataagcccatgatccgtgcgcgtttgattgcaattgtcaaacgacgttggttcttagcacttgtaccagatacccgacgaggtaaaatcttaccacgttctgagataaaacgtttcaataaatcagtgtctttgtagtcgatatattcgatgtggttagcagcgatgaaatcaaccttacgacgacgacggttgccgcctcttctttgttgagccattgaaagttcctccttccaaaacagtttattttagaaaggtaagtcatcatccgaaatatcaatcgcttgaccattatttgcaaatggatcggcttgagtgttatttgcggctggtgcgttacccgtttgttgagggctggtaaatccagattgttggctaccattgctttgattactattaaagttctgacttgcgccatcaccttgccgttgctctgttgttgtccgtgattctaacaatgagaaattatcgacaaccacttcagtcacgtagacacgttgaccttgttgattttcataatttctagtttgtagacggccatcaacccctactaatgagccctttttagtaaagttagcgaaattttccgctgatttacgccaaatgacacaattaataaagtctgcttcacgatcgccgttagcgttcgtgaattgacggttaactgccattgagaaagtcccaactgcagcaccactagaagtgtaacgtaagtcaacatcgcgtgttagccgaccaacgagtacaactcgattaatcattctgtcagctcccctctattcaatattacaattcaaaattagtcttcgcgtttaacgatcatatgacgtaaaattgcgccatcaatcttagctagacgatcaaattcgtttaaagcttcatcattatcagctaaaacatttacgatatggtaaatgccttcgtgttgattgttgatttcataagctaaacgacgttttgaccagtcttttgaatcaaccacttcagcaccgttgtcttttaagatgccgtcgaaacggttgacaagggctgttttactttcttcatcaagtgttgttgagatgatataagtaacttcgtattttgattgagccatgactgttcacctccttatggactttaggttcttacctgtgtaagaacaaggagtaactgactaatattactattagcctcacgatttagaccctgtgcctaaatcacagatactcacaagataaaagtctatcataaatagcacgtaaatacaaacttaaaaaaaatcgtttttgctaacacgcttgttaatccttacaagtgtaattacgcaaaaacgatttttatttttttaaattagtcgttatttggttcgttttgattctcttcagcacgggctaataaatcatcaacttgtgctaagccagtgtccgtcacgttttcagttggcactgttggttcagtcgttgcagtttgtgtttcaggttcatctggttcagcttcgactttggccattgttgccaccttcgcttcgtcatccacacgaatcaagcgcacaccaagtgttgcccgaccggtttgtgacacgttagccaccttgaaacgaatcaagacgccggtatcagtaatcaagagaatgtcttcttcaccagttactgctgcaatcccggctaatgggccattcttttcagtgatattggcagtcttaatccctttaccaccacgacccttgattggataatcgctaacggctgttcgtttcccgtaacctttttcagaaatcactaagatttcttggcccggaatcaacaagtcagaaccaacaacgtagtcgccttcgcgtagacgaatcccacgaacgccggctgctgtccgacccattgaacgaacggctgtttcactgaaggaaacggcgtagccattatgcgttccgataaagatgttttgttgaccatcagtcattaagacgttgctcaactcatcatcttcatgcaaggtcaaggctttcaggccattgctccggatattggcaaattcgccaacggccgtccgtttaaccgtccctaagcgggtaatgaagaacaaggcttgttcaggcttgacttccttaccgatattgaccacggtttgaacgcgttcatccgaattaatccctaagagattaataattggaatccccttggctgttcgaccgtattctggaatttcataccctttagcacggtaaactttcccagtattcgtaaagaagaggagcacttcatgcgttgaagttgagattaagtgttcgatgaaatcatcatcgtgaacacccatcccttgaattccacggccgccacgattttgaactttaaattcactcgctggcaagcgtttgatgtagccgttatgcgtcaaggcaatcactacatcttcttcttcgattaggtcttcatcttcgatactgaggacttcgccgaccaataattcagtccgacgtttgtcgccaaatttactttgaatttctaacaattcatcataaatgattttcttaatccgttctggtttggctaagatatctttcaaatcagtgatcaacgccatcaaattattgtattcattttcaactttgtcacgttccaaaccggttaaacgaacgagtcgcatatccaaaatagcttgggcttgtttgtcagataagtcataacgttccatcaacaagactttagcggtatcgccagtctttgaactccggatgatttgaataatagcatcgatatgatccaatgcaattcgcaaaccggccaagatatgggctcttgcttcggctttcttcaaatcaaattcagtccgacgacgaatcacttcttcttgatgcactaagtagtgttcaagaattgattttaagcttaagacttttggggcaccgttaacaatggccaccatgttgaatgagaatgaggtttgtaatggtgtgagtttgtagagattatttaaaaccactgaagcactcatatcacggcgaacatcaatcacaatccgcatcccgtcgcgatcagattcatcgtttaaatcggtgattccttcaagacgcttgtcccgtgctaattcggcaattctttcgaccaattttgctttgttgaccatgtaaggaatttcagtcacgataatccgttcacgaccgtttttcttaacttcaacatcgactttggcccgcaacgtaatcgtccctttgccggattcatacgcatgacgaatgccagatttacccattactaacccaccagttgggaagtcaggtcctggtaaagcatccatcaagtcggcggttgttgcatcaggattatccatcaaaatatggatggcactgatcacttcagccaaattatgcggtggaatattggtcgtcatcccgaccgcaatcccggttgccccattgactaacaagttcgggaagcgcgctggtaaaacagcgggttcgcgttctgattcatcgtagttaggcacataatcgattgtatttttgttgatatcgcgtaacatttcaacagccattttactcatccgggcttcggtataacgcatcgcagccgcgccatcaccatcgacagacccaaagttcccatgaccatcaactaacatgtaacgataactaaattcttgtgccatccgcaccattgcttcataaatcgctgaatcaccatgtggatggtacttccccataacgtccccaacgattctggcggacttcttataaggtttttcaggggtaacccctaattcactcatcccgtataaaatacggcgttgtacgggctttaaaccatcacgaacgtctggtaaagcacgggcaacaatgacactcattgcgtattcaaggaatgatttacgcattgttttagataaattgacgttttcaatccgaccatcttggccattttcgtttgccattaatctattaaacccctctcagtcagtcttcattgatcagtagattactacgcatcaatactctttggatccatgtatacggcattttcttcgatgaataggcgtcttggttcaacacgatcacccattaacatttcgaaaatttggtccgcttcttcagcatcttccacgttaacgcggagcatccgtctgttttcaggatccatcgttgtttcccataattggctggcatccatttcacctaaccctttgtaacgttgtacttctggtttaggacttggttgtagggtgcctaagacatcttgcaattcttcatcagaatcgatatagcgcatcatcttaccttgtttaacccggtacaaaggtggttgcgcgatatagacgtagccagcttcaacgattgggcgcatgtaacgatagaataacgtcaataataacgtccggatatgggcgccatcgacatcggcatcggtcatgataatcaatttatgataacgggccttttcgacatcgaattcttgtccaaagcctgttcccatggccgtaaagagcgtccgaatttcttcattcgctaagattttttccatgctagctttttcaacgttcaagattttcccacgaattggcaagatagcttgcgttaaacgtgaacgacctgatttcgctgaaccgccggcagaatccccttcgacgatgaataattctgagatttcaggatctttactactgttatcagctaacttaccaggtaaattagagatttcaagaccatttttcttccgtgtaacttcacgcgcgcgtttagcagctaagcgtgctctggccgccaatgagcctttatcaacgatttgacgagcgattgatgggttttccatcaagaacttcgtaaagtgatctgagaacatccgatcagtaactgaacgagcatccgcattgcctaacttcgtcttagtttgaccttcgaattgaggatctggatgtttaactgagacaacagccgttaacccttcacgaacatcttcccctgaaaggtttgcatcacttgctttgaagatattttgctttgttgcgtagtcgttaatgacccgtgttaaagccgtcttaaagccggattcatgtgtcccaccttcgtaggtatggatattgttggcaaatgttaacaaattggtccgataatcattcgtatattgaagcgccacttcaacggtaatcccgttttgttcaccttcaacatagattggttcatcaaggagtgtttccttcttttcgtctaagaattcaacgtaactcttaatcccaccttcatagtggaattcaagtttttcatgggtatcagcccgtttgtcggtaaacgtcaattttaagcccttattcaagaatgctaattcgcgaatccgggtcgttaaaattttatcgtcatagattgtcgtttccgtgaaaatatcaggatctggcacgaaatggactttagtcccatgttcatgttcgggtgcgtcgccaatcattttcattggtgtttgaactttcccacgtttgaaatcgatgtaataacgcttgccgccttgtgtaacaacggcgtctaattcggttgacaaggcattaacgactgaggccccaacaccatgcaacccaccagaaactttgtacccgccgccgccaaatttaccaccggcatgcaaaatcgtaaagacggtttctagcgctgatttacccgttttggcttgaatcccaactggaatcccccggccgtcatcggtcaccgtaatactattatcaggttcaacgacaacgttaatttcagtcgcaaacccagcgagcgcttcatcaattccgttatcaataatttcccaaaccaaatgatgtaacccttgggaactagttgtcccaatgtacatccctggtcgtttacgaaccgcttcgagtccttctaagacttgaatttggctcgcatcataagatttggcccgttcttcttttgcctcaatttgggcttctgtttctttgttcaattgatcatctgccaagaaaaatacctccatttgatcgtcttattatgccaactattctgcttgttcttctatgacgaccccgttggtgactgtaaacacgcgcggtgtcgcaataatttcttttttaacattctctaaactggttgtcgtgaggaatgtttggactttgttttggaacgtcttcaacaaatgtgtttggcgtaaatcgtctaattccgacaacacatcgtccagtaataaaatcgggtattccccggtttgggccttcatcaagtcaatttcggccaatttgacactcaacgcggttgtccgttgttgcccttgggaaccaaaggcctgcacatccttatcgttgactaaaaattgaacatcatcgcggtggggaccaatcaacgtcgtgccttgttcaacctcacggatttgttgtttctcatacaaggtttgaaattgttgatagagttcttcgacactttgatccaattgttcttctggaatctgactttgatatttaaacgtcaagacttcccgatccttcgtaatctcctgatgcaatttttgggcccatttttccatttgttggagaaactggcgccgggccacggtcacttccgccccgtaagccgctaattgatccgataaaacacctaaataaacaagatccttggcttggcgccgttggagttgcttaagatattgattacgttgtttcagaattgatttgtattgcgaaatattatagagatacttgctactcatctgcccgaattccatatcaatgaaatgacgtctcacagcgggcgaacccttaacgatgtttaaatcctccggcgcaaataacacgacgtttagctgaccaatatattgtgataacttggcctgttctaaatgattgaccttcgcctttttacctttttggcttaaaacgagttctaacggggttttccctgcagaacgttggaccaagccggtaattttagcgaaatcttcatgccattgaattaattcgcgatcggtattcgtgcgatgtgagcgggccaaggctaaaacgtagattgcttctagtaagttcgttttcccctgcgcattttcaccaatcaagacgttcgtatccggtgaaaagtgcacatcaactgactcataattacgataatgattcagttgtagttcgcttagatacatagctgcctacaatctttcttgttgtttaacgatgaattggccgttatctgggacttcaatgacatcctctggatataacttccggccacgtcgatcatcaggttcgccgttgactaaaaccgtattttctcttaggaaccatttggctttgccacccgtttcaataatgccggcttcttttaggagttgtcctaatgtgacgaattcagcctcaagtttaatttcttgtgtcatattaacccaccattcttaacgatattaattactggaaaaataacgatccgttatacctagtaattatagacttttttagcactaaaaacaaataaacatggttaaaatgctttctcagcgtttttgacaaaattacccctctcctactagaaatatcttaaatcgctgtaatcgaatttattttaattctagttcacaaaaaaacgcctctcatcgaggtgtttttgagttgttatttaattttagaatgtccggactggtgtgatcaattgaatatagtgttcttgatcttcacttggaaccaacgtaaatggtcgtaaagcagccgtaaagttaatcacgattgttgtttggccaaatgaacgcaaggcatccttcatgtagtcagggttaaatgaaatttcaagggattcacccgtgaggttttcaaattgaagggcttcttcaacattccccacatctggtgaattaccataaataatcgctgtgttagcctctgtgtcgagtgttaaacggacaacgttattccgactttcatgggataacaatgacgcccgttcgatagcggccaataagactggcgcgttaaattcgatttgggtacttgatgaagttggaattaaacgtgctgtatcaggatagttaccttctaataagcgtgaataaaaggctaagttgccagctttaaagaggacttggttttcagcaatccgaatttcaacgtcttcggcatcatccgcaagcgttcttgaaagttctaccaaactcttaccaggaatgatgacgtcataattggcatcacttggaagcgcaactggtaatttacgttgtgctaaacgatggctatcagtcgcaacggctaacatttcgccattggctaggaccaagtggaccccagttaagattgggcgactttcttgattagaaacagcgatgacggtttggtgaatgagttgtttcaaaacatcagtgctgatgctaaatgtattttgccctgcaatttcaggaaggtgtggataactattagcgtctaacccgttgattgtaaattctgatttaccggagcgaattgttgtttggaaattatttccaactgcaattcgcatctgatcttctggtaattttttaacgatttcactaaagaaacgtgctggtaacacaatttcgccaacttcttcgacgactaattggtttttttcatctgaggctgacaatgttgcttcaattgagatatccgcatcactaccggttagcgtcaagccttcttgcgatagaacaagtttaagccctgttaggatcggaatcgttgttttagctgaaatggcccgttgcacatcattgagcgttttgataaatagggcgcggttaattgaaaatttcataggtgctacctccgagggtgaatattatatatatattaaaagattttaaagtaatagtagtagggcctgtggaacctgtggataagtattgaaagccaagaatctcatagttttccacctgtggataaaatgtgagaaatccttaggataacttttacctttatccacaacccatttttaagacttcattgtgttctttaaatccaaaatggcatcttttaggttttgatcggttgtcaaactttgactaatccgttcatgagcatgcatgacggtcgtatgatctttaccgccaaactcttggccaattttaggtaatgagctgtcggtcatttcgcgagcaaggtacattgcgatttggcgcggcaacacaatctctttgacccgcttgcgacctttaagatcagcaacggttaagctgtaatatttagcaaccaccgattgaatcttggcaatcgagagctgactagatttaccgttgagtttcaagcctttgagcgcgtcggccgctagactggttgtaatctcagcgttttgcatcgttgcataggcttggacccgcacgagtgcgccttctaattcccgaacgttggaatcgatttgcccagcaatataactgagcgtatcttctggaatttccagatgttccgcatcggctttatttcttaaaatcgcaattcgcgtctcaagatcaggtggcgtgatatcgactggtaacccccatttaaaccgagaaaccaagcgttcttgcagcttgggaatctcatttgggaggcgatcagaggtcaacacaatttgtttcttatcattatagagatcattaaatgtatggaagaattcttcttgcgttccttctttatcagcgaaaaattgaatatcatccactaataaaaggtcgacgttccggtattcttgtctaaatttctcttgattcttcgtttgaatcgaattgataaaatcgttggcaaaagcctcactcgtcacgtacttaacgttcgtttcgggttttgattcgagtaattggtgaccaattgcttgcatcaaatgggttttacctaaaccaacaccaccatataagaagaggggattgtataagacaccgggttcttcggaaaccaccaacgccgcagcgtgggccatttgattgcctttcccagtgacaaacgtatcaaatgtatatttactatttaaatgcgtttcacgtaaaaaggttggtgtttcagccttcgttaaaacgtgttcttcttctggttcaagcggtgttaagttgtcagattcaccaggtaacacaaaaataggggtcagctcgatttccgcaaactcataggccccttcaacgactttagtcgccaagttattttcccagtattctttgtgcaagacagaaggcacttcaattagtagttcgttagctctaaaagcaagcggcttagcggttttaatccaagcgttaaagccaaccgtggttagatcggtttggaatttttcttgcagataattccaaagttcctgaagatcaggcatgtagcgtgtcctcctcacataaaatcaccactttattgaaaaatactcaataaagaaagactaaatacattctagcattctaaaaaaaagttttccacaacaagaacaaaatccacaggataaaaataaaaagttatgcactcatccacaacgaggcggataacttttattctggggtgtggacaactgagaaatacacagcaattttagagttatccacaaaaacgaattgaaaatagacgctttcatagtgcgggttcttcagacttattcacaacgttaaaaacaggtgtggataactaataaacaccctgtgattctctggataactctggtaggtttgctggggataaaaattatgttaaaatcgactattcaggttatccacaagaaaaacaaaatttttcagatctgtggacaaccaaatttaacgaatttttttacagaaagtgttttaacttctatagaaatatgctattatattttagtgaatgtcataggtggttattgccgccagttgtttctcagataagaaaacaatagacatagtcaattaggaggtgccagattaatgactacaaagagaacatttcaaccaaagaaacgccataaagaacgtgttcatggtttcatgaaacgtatgaatactaagaacggtcgcaaggtacttgcaagacgccgtgctaagggcagaaaagtattatctgcataggccactgatgcttcagtggtttttttattatcctcaatttattaatagaaatgccggagtgaattatgagaaagtcgtaccgtgttaaaaaagaacaagatttccaaacggtttttgatgcaagtcaatcagtggccaaccgcaattttgtggtttaccgcttagataaacctggtcaaaaacattttagagtcggtctttctgtcggtaaaaaagtgggtaacgcagtgatgcgtaatcaggtgaaacgttatattcgccaaagtattacggagttgaaaccagatttgttgcaacccgttgactttttggtgatcgcaagacgtggcgctaatcaattaacgatggcagaaacaaaacaaaatttaatccatgtcttcaagctagctaagttattaaaggaagaagcagattctgcttctgaataagtgagggattgagagtgaattcaaaaaatcgcaaacgactattattagtcgctagtttattcttatttatgctaattgctgctgggtgtagtactgcacctgttagcagtgctagcactggtttctgggatcactatattatttataacttctcacgattcctgttgtggttagctgatatctttggtggtagttatggttgggccatcgttgcctttactattattatccggttgattattttgccattaacttggtggcaaagtaagacaatgatgaagcaacaagaagtggcacctgaaattcaagcccttcaaaagaaatacgcttctaaagatgttgaaacacaacaaaaattacgtgaagaaacacagaaactttacgctgaagcaggggtcaatcctgtgattggttgtttaccattattggtccaaatgccagtcttgattgccttgtatcaagccatctaccggacatctgctttgaagagtgggtcattcttatggatgcaacttggtaaagctgatccgtactttattatggcgattttggcggccgtctttacgtttgccacatcatatttaacgatgatgtcacaaccaacgaagaatgccacaacgaccgcaatgctctgggtaatgccaatcatgattttcgtgatggcgatgaacattgcgtcagccgtttcaatttactgggtagttacaaatgccttttctgttggtcaaacaatggtgattcaaaatccattcaagatccgtcgggaacgtgaagctaaagaacaagttaaacgtggtcgggaaaaagcacttgctaaagcacgtaagaaagcaacgaaaaaacgttaattttaaaattaaaagaccgaccagcattttatgctggtcggtcttttttgtgttttaataatccaactgcttcaagcggaataagaagtgctggtcatcaattggttttagatgatagagcgtgaccactttgcgcgttaatttggtgtcgatcggggctgcatcaccaaagagatgaaagtgatcgaaaaacgccgtgttagcttgttcgataagggttaaaagaccggcaccacctagatcgctgccgaggtgggcttcatctgatagttggctagccttgagatgttgaccgtactggatcaattctggtccggtcgccatgatttcgtcagggacttcacgcctatttaataatgcggctaaatctgccaatgtgttggctggtatttgttcaatggtcatgttcagcatcgccttcctagcagttatgtatctgcttacatcgctaatataacagatttaaattaaatgtctagtaggcggccgtttaaaatcgtcgcactggtcgttaaaattcgttataataggcgcaatagttgaaaagcggagggcaaggatatgacttactcagaacaatgggatttagaaaccatttttaaagggggcttagcctcaccagccttagaaaatcgactccaagcattggggcaacagattccggttgttttaaaaatgacaagtgactggcaatttgtgtttgatgaaccagcctttgaacaaatgcaggccatcacgatgcaattacaacaaattgaatccgggttgaagcaaacgggcagttttgtcaacatgattcaatcggttgacgaacgcaaccaacaagtggcatccatgatggaccggattaatcaattgcaaaataccgcccgtcaaattgatgtcttattgacgaaaaaattggtggccttgactgttgaacaattcgaaacattagtcagccaaccagcctttgcgccgattcagttcaacctacgggaaaaacgccagcaaggggcggacttattagatgaacaaaccgaaaaattattggatcaattggcactcgatggtttgcaaggatggagtgatcactacgatacaatcgttgcggaaacccagattccttatttagatcaaaccttatcagctgggcaggctcaaaataagtttgaatcagatccagattctaaagttcgcgaagtggtttttaaaaattggcaacaaacttgggatcgtttctcaccaatgttggcggataccttgaatcacctagctggttttagattaacgacttaccaagctcatgggaccaccgactttatgaaaaaaccgctggaatataaccggatgcaaccagccacactggatgcgatgtggtcggtagtcagccaaaataaagcaccactggttgcttttttgaaccggaaggccgctttaatgggtaaaaagcagttagcttggcaggatacttgggcaccggtcgttgttgatgatttccagatgactaaaaaatcgtatgacgaagctgctgaatttatcattgcgcatttccgggatttcagtccgaaaatggcagccgtcgcacaaacggcatttgaaaagcagtggattgaagcggaagatcgaccgggtaaacaaccgggtggctacatgaccgatttacccgagacgaatgattttagaattttcatgacctatgatggcacacccggcggcgtctcgactttggcgcatgaattagggcacggctttcatacgatgatgattaatcaattacctggctggcgccaagattacgcgatgaacgtcgccgaaacagcttcgacgttggcggaattaatcgtggtcgacgcaacggtcaatgaagcacaagatcgcgcaacgaagattaacttactcgatcaaaaaataacgaacgccatcgatatgtttatgaatattcatgcgcgctatttatttgaacatcgtttctatgaaatgcggcaacaaggactactaacgcctgacgatttgaaaggcatcatgttgagcgcccaaaaggaagcctatgcggatgcgctaacggattatgacccattattctgggcggacaaacaacatttcttctttgatgatgtgccattttataacttcccgtatacatttggatatctcttttcaatgggaatttacgccaaggcgcaaagtgtgccgcactttgaagcggattatatcgcactcttgcaagacacagccaatatgagtactgaagaattggcgcaaaaacacttaggcgttgatttgatgcaaccggcattttggcaagcagcggcggactcgattgcccaagatgtggcgctctttttagaactaaccactaccgatttagattaagtgtcgcttaaaaagcgggcatgttatactgatattagataaaaataagcgtccagtgacaaactgacgcttaatgagcggaggtttaaaaatgccaacttttgaaggtaaggatattcaagccgcaattgatgcggggttagcagcgttaaaattaacgcgtgataaggtcacagttgatgtccttgaagaaggtaagaaaggttttttaggttttggtaagcaaccagcaatcgttacgttaaatccgataacggtcgctgagccaaccccagttgaaccggaacaaccaagcgttgaagacgtggcaactgaaccagcagatcagccagaaaaggccccaatgcgtcagagtcgtgaggcgacgatcgaagctttaaagcaatacattaccgacataacagcacagattggcacgccggttacgatgaccgttacaaaagaacacaagcaagtcatcttccatttaaagacgactaaggaaggtttgctgattggcaaacacgggaagacgatcaatgcgctccaatatttagcgcaaacgtattacgatcatcacaccaagggaaaacagttgatgatgctggatattggcgattatcggcaaagaagagcgacaattgttaaacatttagcggataaggcggccagagaagtggtcgcaactggtaaggcggtcactttagagccaatgccagcgtttgaacggaagattgttcatggctatttaacgaacaaccgtcacgtccaaactcactcagaagggcgcggcgatcgccgggtaattgtggttgaatcagcccgttctttttaagacttgtcaattgacggtcgatagaaatcgtgtataatggaactaattaaatatcgataaagtagtgaaagtgctttgtccaccccttacgcaatgacgggaggggtggacgctaagcgctttttttatgcagctattttaggaaggaagcttttataatgccaacgacagtcacagaatttgatacgattacggcgatctcaacaccacctggtgagggggcaatttcaattgtgcgtctttcaggagatgacagtttagccatcattaaacgggtttatcgcggcaaggatctcgataaagtggcgagccatacgattaattatggccatattattgaccctaaaacggatgcggtggtcgacgaagtcatggtttctgtcatgcgagcgcctaaaacatttacgcgcgaagatgtgattgaaattaattgtcatggtgggattgtggcgactaaccgaatcttgcaactattgatgagttacggtgcacgaatggccgaaccaggtgaattcacgaagcgggcctttttaaacgggcggattgatttaacccaagccgaatctgtgatggatcttatccgggccaagactgaccgggcaatgcaagttgctgttgatcaattggatgggagcttaacgcatctcattaagaatttacgccaagaaatcttagaagtattggcgcaagtcgaagttaacattgactatcccgaatacgatacggatgaaatgacgacccggattttacttgaaaaagctgaacttgttaaagggcgaattggtgaattactccaaacagcgcaacaaggcaaagtcttgcgtgaagggttggcaacggccatcgttgggcgaccaaacgtcggtaaatcaagtttgttaaaccatcttttacatgaagataaagccattgtgacggatgttgctggaacgacccgtgatgttttggaagaatacgttaacgtccgcggcgtaccattgaagctggttgatacggcggggattcatgataccgaagataaggttgaaaagattggggtcgaaagaagtcgcgcagcaattaccaaagccgacttgattttattggtcctaaaccaaagcgaacctttaacgattgaagatcgcgaactaatcacggcgacaactgataagaaacggatcattattttaaataagactgacttacctaatcaattggacttagatgaacttcaaacattagttcgtgcggatgaagtgattcaaacgtcaattttaacgagtgaaggggtgactgatttggaagcccaaatcgccaaactcttcttcggtgggattgaaaatagccaaagtacggtgatgattaccaacgcccgtcaaattggcttattaaaccaagcacaacaatcattagatgaagttattagcgggattgcagctggcatgccagttgacctcgtccaaatcgatatgaccaactgttgggacaagctcggtgagattaccggggattcagcaccagatgaattgattacggaactctttagccaattctgtttaggtaaataggtcttgaaccatattaaaggagaacaaaacatgcgagaatatgacgtagcgcactacgacgtgattgttgttggtgccggccatgcgggttccgaagcggcattagctgctgcacgaatgggccgcgaaacattattattaacgattaacttagatatggtggcttttatgccatgtaacccatcattgggtggcccggcaaaaggcatcgtggtccgtgaaattgacgccttgggtggtcaaatgggccgcaatatcgataagacttacatccaaatgcggatgctaaatacaggtaaaggcccagctgtccgcgcattacgcgcccaagctgataagcatgcctatcaccggacaatgaaacggacaatcgaaacgacggagcacttaacactccgtcaaggcattgctgaatcattgatcgttgaagacggtgtctgcaaagggattgtgactaacacgggtgctcgttacagtgctgacagtgtgattttaacagccggaacagcctcacgaggcaagattatcattggtgaattaacgtattcatcaggtcctaataattcaattccttctattaaactttcagagagtcttgaagataacggttttgtgttgacgcgttttaaaacggggacaccaccacgagtggacggcacaacaatcgatttttcaaagacggaagaacaaccaggggataaggaaccgaaccactttagtttcgaaacgcctgatagtgcttatttgaaagaccaactttcttgttggatgacgtacacgaatgatacgacgcatcaagtgattcgcgataatctcgaccgcgccccaatgtttaccggtgtgattgaaggtgtcggcccacgttattgcccatcaattgaagataaaattgtccgcttcgcggataagcctcgccaccaaattttcttggaaccagaaggccgcgaaacagaagaatactacgttggtgatttttcaacatcaatgccagaagaaatccaacacaaaatgattcattctatcgaagggttagaaaatgcccaaatgatgcgccctggttatgcgattgaatatgatgtcgttgaaccatggcaattaaaaccaacccttgaaactaaagtggttgaaaatctttatacagctggccaaatgaacggcacttcaggttatgaagaagctgctggtcaaggtttgatggccgggattaacgccgccctcaaacaaacgggccgcgacccattcatcttagatcgaagtgaagcttacatcggggtcttaatcgatgacttggtcacgaaggggactaaggaaccttaccgtctattaacctcacgtgcggaatatcgtttaatgcttcgtcacgataatgctgatttacgcttaacggaaaagggtcatgaattaggtttaatcaatgatgaccgttttgacagttatgaagtgaaaaaagcagcggttgaagctgaattagcacgtttagaaaagattcgcttaaaaccaacaccagaaatccaagcctttttagctgctaaaggtgaagcgccacttaaagatggtgttttagccagtgacttcttaaaacgaccagaagtgaagtatgccgatttaattcaattcattccagcggttgaaggaatcgataaccgtgttgtggaacaagttgaaatccaagtcaaatatgcaggttatattgataaggaaaaggctaagattgcgaagttaaaacggatggaagctaagaagattccagccaatatcgattacgacgcaattgaaggtcttgcaacagaaggtcgtcaaaaattacaaaaaattcaacccgaaacacttgcacaagcaagtcggattggtggggtgaacccagccgatatcgggattctaagcgtctatattcaacaaggtaagattgctaaggtcaaatagcctggttgataactagtcattagatatgttagagttaagcatatattgtcaatggtagaaagccagccgtttcacatgaaacggttggctttttagagtcatgaaagaaaagtgagggaatcaagtgataactgttagtgaaatgagcttaacgctttctgggcgtaagttatatgaagatgttaatttgaagtttacacctggaaattgttatggcgtgatcggtgccaatggtgcaggtaagtcaacttttctaaaattattagaaggtaaattacaaccatcatcaggccacatctcaatgggccctaatgaacggatgtcgagtttgaatcaagatcactacgcttttgaagaattcgaagtgttagagaccgtgatccaaggtcataagaagttatatgaagtgatgcaagctaaggatgccctatacgctaaagctgaattcactgaagaagatgggatgaaggctgctgatctagaagctgaattcgctgaaatgaatggttgggatgctgaatcagaagctgctcaattactccaagctttaggtatcgatgaatctttacaccatgtgaagatgagtgaattgatggaagggcaaaagattaaggttttacttggtcaagcgctctttggcaaacctgatatcctattattggacgaaccaactaatggtttggacagtgcctcagttgaatggttagaaaacttcttggctgacttcccgaatatcgttattgttgtttcccatgaccgttacttcttaaaccaagtatgtacaatgatgtgtgatgtggactttggtcgcatcaagacatttgttggtaattacgacttctggttagaatcaagtaagttggcagctaagttacaatcaaacgttaatgctaaaaaagaagaacaaatcaaagaattacaagactttatcgcacgtttcagtgctaatgcttcaaaatcaaaacaagctacttctcgtaagaagcaattagagaagattacattagaagatatccaaccttcttcacgtcaatacccattcattaagttcgatttcgaacgcgaattgggaaatgaccttttacgggttgagaacgtctcaaaaacaatcgatggtgttaaagtgttagataacatcagcttctcagttaagccagacgaaaaagcagcaatcgtttcacggaatgacgttgcgacagctgtcttaatgcaaatcttagctggtgaagtagaaccagatagtggtacagtgacatggggtgtgacgagtcaacaatcatacttaccaagagatacgaactcagcctttaatgatgatcaactcattatcttagactggttacgtcaatttgccgctaagggtgaagacgacaataccttcttacgtggtttcttagggaagatgttattctcaggggatgaagtaacgaaggaaattaatgttctctctggtggggaaaaggttcgttgtatcctatctaagatcatgcttcaaaaatcaaataccttactattagatgatccaactaaccatttggatttggaatcaattacatcattgaatgatgccttgatcgatttcaagggtgcgttgatctttacatctcatgatcaccaatttattcaaacaattgcagatcacatcattgaagtttcagctaacggtttagttgatcgtgccgaaacaaactatgatgaattcttagcacatccagaattacaaaaacaagttgctaaactatacgcttaataacaagagaagaccagcagacacggatttgtgtcgcgggtcttctttttttgaatctttttcagaaagtccttgtatctgctattgtaagttggtatactagtaaagttgtcgcaagcgagtagctcagtaatgagtgaggaaataaataattaaaatgtttttgaaaaacacttgttatttatttctaatcgtgataatatattatatgttgcttacggagctgttaaaccaatcgacgtaattctttgtgatttccttggttctgttgcaaagttccccataacacctgatttattgtaaaatgtaataaaaaagaatgcgaggacaacagatgaatcattttaagggcaaacaattccaaaaagacgtgattattatctctgttgggtattatcttcgctataatttgagttatcgtgatgttcaagagatgttatatgatcgtggcattaacgtttctcacacaacaatttaccgttgggttcaagaatatggtaagctgatctatcaaatctggaaaaagaaaaatagacagtccttttattcgtggaaaatggacgaaacttatattaaaattaaagggaagtggcattatctctatcgtgcaatcgactcagaaggcatgacactggatatttggctaagacgaaagagaaatactcagtctgcttatgctttctttaaacgactatacaagcagtttggggaaccgaaagttatcgtgacagataaagcaccatcaattgctagtgcttttaggaagttacaaaagcaggggctatacagcgaaactgagcaccggacagtcaagtatctcaataacttaattgagcaagatcatagacctgttaaacgtcgaaataaactttatcaaagtcttcgtactgcatcaactacgattaagggcatagaagcattgagaggcatatacaaaaagaaccgaagaaatggaacgctcttcggcttttcggcatctactgaaattaaagttttgatgggtataccagcatagtcaaagtatcagaatgggacttttgtactcagtattgaaactttgcaacagaaccagcaacactgtcatcacagcgattatatatttccgatattttttcattaatatgtcctccattatccaagtaagttgttatcgtcgtcctcttctggctcctctgtttgactatctttatttgaaactctctctaaatcgctgtctaggttgtcctgttgttgctcctcctctttctgagacatcttgtttgcgacttctttttgagcagtctcctttaattttgctttccatttttctactttattcttaaagttggtttcttgactggcttctggttggccttgataatcgttctgtgacaagttaaccaaatgatcggctcctggaaatagtttaaattggaacgcttttgtcgctttgactggtcgcgcattactaaagattaataagctctggtcttcgggcatccgcataatttcatcgggcgtcatgagcgaacggctcgtatagctgtaactatcgctcttgctgtggctttcttccttgctatgactggtactctcactaccggtttccactttcacggttgattttcctaacagatcactaaagtatttagcggtcacatcattagcggcattcaagcaaattttaacggcatgattacctaagatactctcggccttatccttgccatacaaggcttgtagctgggttaaggtttgacaaatggtagtgacaccaatgccgtaccctcgacacgttgctaaaaattcttcatactttgggaatttgcctaaattgacaaattcatcaaggataaagtcgacttggtggggcaatttagcgtgatgatcggcggctagtttgtataattcatcaaacaattgtgagaaaaacagattgatgaagctttcataagtgttatccatgacggggataatcacgtacagcacaactttgtcgttgccaatctcttttaaatcaaaatccgaaaagctggtaaaatcagccacttctttgtcaacgaacttcgagatggtcgccaacaagctttcaataatactggccttcatttcgcctttggcctttttgaaccctaactcataagcgcgtctcgctggatcagtcatggttagatcaagaaacagggtgtctaacggactatctgcgcccttttcctcggcctccacatcgttttcttgtaagacttgcgttacaccggccaagttcctttggtcgggcgcgcggtggttcataacaaacaggattagtgccttcaaaagttgccgctgggtactgaaccatacgtcttttttgccttcggcattttcactctgaacgatcttcgtggcgacggtttcagcttgaatatcccgttgaatataatcaaaaggattgtagcgatcactgtgcgccatgttggcaaagttgacgacatgcacttgataaccctgggctagtttgataccggccgtcttttcgtataattccccttttggatcggtcacgacaatgctgttctccgtttcgttaaacagattggtaatcacgactgattgggtcttatacgatcctgggcccccaaccacaaaaatgttccggttgggtttggtgctgttattctggtaaacgatctgtttatctacgatccctaaaattgtcccattcatgttaatctgcccccttcgctgacttttctcgatccaccaatgatttgagaatttcggccttagtactcttgttaaacgctgtggtgaggtctttggtattaatgctaaagtaatggtcgctcaactcttttagatcaccccaggtcgcacttccgtgggtttcagtatctgcggtttcccacgccttatgcttactatttcgcttcaaggcaaaatagatggtgtataggaccacggcgatactgacgataattaataccgggttcttttgccccaaatacagactgtaataatgccaagggtgtaaagctaattgttttaatacggttggcatatgatccgcaaaggttaacttataacgggacaaggccatgacagctccagctaagatctccgctaaatacaagccaatgatcagcgttagtagatacggccaactggctttaacgctgtttaataatttgtctttcatctaatcacctactatctgtttaatttgtgactgcttggtaccggcataccgttgcttgccatgaatcaaggttgggactgacgttaattgatattgctgaatgtagtgccgattctgcgattgattcatgttaataaaaacaacgttatggctaatgacgttgtgccaatagattcggtgaaaaatagcttggcaatccgggcaatcatcgcgatagaagaacaacacttttttagggtgcttagctaaagtcacgattggtcgctgcttttctacgtggttgacatattgatgactggcaaacccgccaacggctaaaaccaccacgattaccgctagggctttaccaacccgcttaattaaggtcactggctttaaaactgctgcctaaattttgtacttcagtgattcgatccgtggtggtatcgaaagtcacctgataaagtaccgttgccttctgccagtcgttgtcgccactcttactttggtagctaacaaccgccaaacctttcatgctttgcccctgcttgctttgcgtatacaggttcagttggtttaacttggctgaaacactattgctatcaccatatgtgcctttatttgaaaagtattgctgatatagcttgtcggaaatcaagcctttcacgccatctttacgctggccgtaggtcttgggcttaaagttgttcatgacctcaaagaacttggtgaccaccgtattaaagctaagttcagcctgacttttatctttattattttggtaggtcttatagctgtcaatttgggtgctcaataactgcttttgttggttaactttagtcaattgctggttaacttgtcgcttctgtttttgtaaacgactgatctgctgttgtgcctgcttaacttggctatgctgataggcattcgttcctaatgacataattaagatcaaactaccaagcgcaatacttaataccacgctacgcttcatttgttggttcctccttacttcttgattggccgggctaacgttacatcgctaccgttcaataagctataaaacgcggtgccaagtgtgctttcgttaaccttgtcgcctacaccaccttgctcaatgattttggtggctttgccttgccacttgtctaacaagattgcggtatgcccattgttcccggccccggcaccttgattaacaatcacaatatcgccggctttggcgtcattttcactgatctgtttcagatattgatgactgcctttggcgtcacttgccatcgtaccggtaaaccagcccatgttggccggtaccttgtaaccagctttattaagcgctaaccagacaaagcctgaacaatctgtcccaccggttttgttaggattctttaaatcgctacctaaatcggggctagggtgggtttgaatatagtagaagtcacccttcatactttccgcgtttttaacaatgctaccgccggaatagcccgggtcactatcacaacctagctcggtcagatcgcctgaactcgcattgtctaaggtgtttccggccactggatcactcgcacccaacatggaataccagtgatcggcatacccgtatctttggcttaaataccattgttccgggttcttactcataccctcgtaatccattaaccaggctttcgtcgctttatgcacgtccatgtacttaaaaatctgtttgtttgacgcatagtaactactgttcaattcttgatcgagatagtccaactgcaccccgagattagttgctggtttattttctttatgggctaaatcttccagcttatcttttcgaccacctaaccactgggctaagcccgtggccccggaacttgaattaaccgaattgggatcaaggcgactttctagttgtaagacccctaagatcccggcggccgcttgtggggtggcgccatacttctgtttccagtgcgcatagatatttttggcattttccgtcatactcttactatctaattgcgtttctgtggtggttgagttatcacaactgttttcttgtagctgaccagtaattgcggcgatcagcaagatgattagcagaatggcaccgcccacaatataagcaatcaacttccacttctttttcttatattcgaaagacagtacttgcatttaatcacccactttgtgcttgacctgatcgacttgtttttgcgctgctgattggtcactctgcgcattctttaagtccgacttagccgaatccaccttcttgtctttgttcttatctttactaccatcaatcttgttggcgtcatctaacttcttttgggcgtcgctaacttcattcttagcagctttgagacttaatagcgctttgagatacttagctttaggactgttcacgccggctaatttggtttggacggtctgggcgtcttgcgtatcgttatgggccaggaaagcttgccccattctcaataaaacatcagcgttcgtcgtaaaggataattggttattgagcgtattggtatcgtagttaacaatcgctttttcgagttgcaattggtctttttgcttgctcgtcgccttagttggcaactgccaatcagccacttggctactatctttgttggcataagccgtgttaacaaccttgttcaactgacttggatcaacctttaaggcttgctggtactgaccatgctttaaaaagacattgacttgcttagttgcaggatagccggctcgttgcatatctttttgtgcttctgaccacttatgatcatttaaagcggtctgaatttgaccgctatattttaatcgcgtgacctgggcttggttctggttagctaagctttgatactttctttcgtcacttttatggactaagccgacggccaaaacggccacaatcgccactccggccacgctcaaccacaaacgttgtttggttttctgctgggccgtttcaacttcctgccattcgtgataactcacaaagtcctcaatgctgttaaccacttccgttaactcatttaacgacgtagctttagctacttgttgtaaatagtcgtccgggtgtttagctagggcttctttaggattgcttagtagccgttcatagggcgtccccgtcaagcaaaatagaatcagcgctttgtatttggctaaattgctatgtttgtcatcataaggcatgagttcattggcgcgataggcgtaccaaacatgttgcatggggtaataccacagattagctggatttaacgcaacgtgatactggctatcagcaaccaccttttgcgccatgatttctttcgcaatggccgcccggattgccttattctcatgtggtaattcctttaatgatctgaccttatctggcaaggtataagttaaaacgaccttttggtcttgctcaaccacgttaaccaactgcaagaaattggcatcagcttgctttaattcgtttagctcactcaactggtcatatcgaaactgattgtgattgagttcgaggattaacttgtttccttgccgcctgaacgtcccaacctcgatattcaataactgatttgatttactcatttaaagcccctccttcctcctcggtggtggtcaaagcgtcaatttcacttggcgtcaacaccacgcgcttttgataatccggttggttggcggtctcacggttatatttttcctggtaagcttcgggatcaattaaccgcaattcttcttcggtcaactcgactttcataaaggcacgttggctgccatagatcatcagggcttcgccttgtctacgacgttctagtagtttcttttctttatctgagaacgtcatacgcaacttagtaatgacgtcatcaacgcctttgccatcaaggccaaagaacactttggtataggagttcccaataatggcttcacctatattttgaccggtatcagttgttccttcgatcacatcttgaatttgctgcgtcccagcaatcgccccggcattgtactttctaaaccgcttgtatgcttggtggaaaaaggtggcggccgctttatgcaaagtcaaaaagtgaaattcatcaacaaacaatttcttgcggctatgccgatctttggttatttcgtcccacaaatactggaaggtattcagataagccgctgattggacttcctgttcactttgtaggggctttaaatcaaaggaaatgatcttcccctttaggttaacgttggtgtggccgtcaaataggctgttagagccatgggtataactgcctaaaatatagtagaaatctttaacccgattaaatttgtcggcgtctttatcagctagtttttccaactcgtcataaacattggatagggtcggccactgatcgtctttaatttctttcaagcggctgtatttcaaaacgccactgttgacgtaagcttgtttaacgacatcatcaaggattgccagttcaacttgggtaatcccggttttaaggacttcaaagaacccctttaatcgctggattttatctttgactagtaaatcaaggttcgtgaccgcttcatcagcgctgaggatttcttcggaaaagatttggagcggattaattttgtacttagcattcgaggttaggtgcaagactgcgccacctaaggcttcaacaatcttggtatattcattttctgggtcaataatgtagagttgatagtcttgaatggcgtagcgtagaattttctgaatcatataggtggtcttgccgacccccgaggtcccaataatcacttgattttgattaagcgtcttgttgcgatccaacatatctacggcaattaagctgttggtatctttgttaaccccttcaatatcagatctcggcttcaagtccaaaatttccgcgtcatcaaagggaaacatgctgctggcgacttcggtattactctctttataggtgtaatctcccatgaggttctcgttaattggcatggttgaccaaaatgcttggaaagtcgctttaacgggcactaagggcttcatctgtagcttaatcaaggtgttcttgacgttttcggttaaatcgtctagttctgctaaactgttggctcgcagataaatgagcatatgttggtacacaaatgtggtagaattatcaaggtatttatctagttgcatgttggctgaatcaatataattttgcagaatcttctttttatacgggtcgaacgtatttaacttctgcgcttccttattttgaatcgtcttcttgtaataggtaatcattgaattgttactggcgctgtcgatatattgcacaatatcgataacgccttttttgcgctttaactccgataaccagttgccatacacccgcttaggatagtcggcaatcgctaacacccgaataaaattctcgcccgactggacgtaggtggggtactgttcccagctaaatggaaatagtgaatgcaagctatcgcgatcaatcagcctggtaaaatcctcaacctccggtttgggcttactactcgtttggtcgctgttgccttggttatgttcttttttagttggcataaataaatcaatgaccttatcaccaaaactcatcctgtttccccctatccattaaaattgatcaggttctttaaaatctcttggacttcttgactagtcaaaactttggccgtcacatcaaagtccgttaacgcattttcaatatcccgtttaacctgttcgatcttttcgtctaaatgagtgaccgctaggtttaagctcttaacacttttgtctttaattggcaccttaacgattagcaggtgttgcttagtcgtcatgtttttggattcttggactttagtaaagtgatccaagtaactggccattaattggattttgaactgttgctcggggtgatctttttgtaaagtgagataccgccgtttgagaccattgagataagccgtcatattgacgggaatcgtcggctctaagaactgtaaggtgtcatcaacaccttcgcctaaggtgctcatcagaaacgcaccatagtcctcaaagacgtcttgctgttcggtttcattaagtagatccaggttgatcccactaacttccaaaatgccaacgagattacccgttttggtaacttcgtaattaccatacatacccaccaccaagctcatgtcatcaatggtttctttgccaccattgattttgggcggttggtaatcccaatctagcctggctgatttattggcggttttgttcttcttcaaacgcatttagttcacctcgcttcttcggttttaaataaaacagtttctgaccattggcatagcggcgtttcagcttaaagttatcccgcactttaatattcttccgcgccgcaactggccgaattgttaaaatagccatgacaatcgtcatggctaagacaacaatcactatttttatcaggactaagattagaccatagggtgggatcgcaataaaaattaagcccactagtcctgccagcgccgcatagccaaaatccttcaaggtgtagtctttccagatcccataatctttatctacgttctctggaaagataaattcttttcctttcttcattttggcaggctcctttttaaattaagtgaataggctgtaaacccaaggtaatagccagataatcgctgccgctagggccactaaaccagccacccgaccaaccgcgtgataaacctctgatttctctcgtggatcgtctgcgtcaggcattcttttgataataataaatagcgcgacacaaatcccaactaaaacgaccaagccagttaaaataccttgaatcgtcttaccagcttgagttaacttgcttttaacttcgccgccgtccgccgccaaaacaacctgggcgttcatcagccctaaataaatcgcagtagctccagtggttgctagcgctttcatttttctgaacttcatgttattcctcctttccctcgtcttctgatgaccgtaattgaacttgttctgcctgggtttgctcgggttcccgctggtagaacttatccaattgttcctcggcaatttgctggcttggtaatgggtcggtggctaatttaacgcgaccattttcgctcgtggctaagtaatactctttttctgactgacctagttcttgagtctctaagacatgcaaattatgttcgtaacggcctaaggcgttatcaactttcaacccatagaaacctaagaagccttctaagaaactctcaccaaaaaaggtcatttcgtttttgatctgcttatattgatgggtcggtttgtcgctcaccaatttttcagtctttttagcattttgactgtcttgatggcgattaaaccagccgctaagttttaatggttcaatctttaactggcgtttaacggtcttcttaatcattgcttgccgaacttcatcgattggctgaccgtcttgatctaatatcgcttgtaactgttttagctcggttaacttttgatcgtcatcaaccacaatggccttttggtcatcatggagtaacttgccattaatgccttgccagctttctactttcattggatcacctccttatattgcccttttctaggctagaaatattaagcaactagctttcccctagcccacccggtaaaatggattgttaggagggtgacacctagaaggcgtaattctaggtgctgatccccgttagcaactctactgctgacgaggacgccctctttttttgtttgtttccttatccattcaatgccttccaatgaaattaatttaactgtgccggtttccattaagtattcttcgggcattctatttgggtgccgtcttaaccataagcttacatatgatcgatcatgccctatcttgataccggcctgagataaactaatccattcgtgttgtcttgccacatgcaggtaactcctttcttaaataattaactaaattatagcaccatttgaacacacttgtgtacatttgcttttacatttacattacaagtgcatgcccccatcttcatgccggtttcgagtttggtgttgccgttgctttttcgtcatttcccactcagtctcctttaaaccttgcgcctgtttttgccgttggtaatcttcatcacgggcatatagggcggtcatgattgcgttactaaaggccgtctttaagtaataggctggactaactggcttataatttagcggttgataatgccccatatttgcttttctgtactggtcgtccttggcttgttgcccttttaactgcttttggattttctcgatctgactgttcttaatcgtcggatcggctttgcattcgccaaaaaagagttgtttagtgccatcatgctttaaaacccgttgtaagtgatgattttctaactgatctaagctaagctgtcccgataaataagctagtccttgttgatgttcttggggactgaacacctgtggtggatttgcttgccactgttcaattgtttcagcctgacatggctttaaagcaggatcatagtacatcacggctgtataggcttgttcctgtttagtcattggtaattcatctaaatcgcctttgggaaaggcccttttcaatacttcatggtattgcgttttaatgacttgcttaacggccatgattgttcgcaattctttgactgcgcgagtaatcttttgctgctcggttggtgaatacttttctagtagaccttgatcaacgtgttctagactttctaagctatcatcatgaatcatcagcgtatatttaagctcgattttgacttccttttcttgttgcattaatatcttccagccaacgtatggccgtttggtaaaggtcaataattgtcggaccaataaatcatcacgaatattcattaaacgttcgtttaattcactgcctttgaaaatcgtttgttcactattagtttctttaatcaattcccgtcgttcagccgcggttgtctgttcaaaatcaagctctggataaagttttttagtcgtgcgatcaactactttatttaagagttcatctgccttttttaatgagctttcttgttggttaattgtcaataattgtttagtcacatcttcaccaactgcatgtttaattaaggtgctatttttccaattaaatagcatgcgccgcttatcatctaagttctccaaactgatataagttttcagttcatggcttaactctttaactacccgtttttcattaaacgagaagtgtttacttaggctatctaaatgacctctattgattactttttcttggttatttttataactggctttggccttacgatagtccttaacttgttggttaaattcttttctttcatgccgcttgctattgatcccctcatgttgagttggtgtatcatctattccctgctcgataaatgatttttcactgatccgatccggaatatttttttgctctaaaacttgattgacactagccgcccaattgtgccgccattcagtaattttttcttttttatcccaatcaactagccacacctttcttgatcttggaaaacgactatttcctgtataagtcttgttcccattttcatctaatatattttcccttttacttttcaatccccatgttccgtctggattaaatggacgattagttagcataacatgagcgtgcggattatctgggtgatctctatgaattgctacgtcggcaaccataccctcatcaacaaaattttcttgtacatattttgtcaataattctttctgttcgtcttcacttaattcaactggtaaagccacattaaactcttttgcatagcgtgaatttgctcgccgatcttttctttcgacttcattccataatttctctctatcactcgcccattctggcgcattctttggtgtcaaaataaagctttctggcatgactgaccgagcataaaaatagcttcgaccttctttttgatcgaataacttttcaccacttctataacttgctccagcaatggcactacgtcctttaccagcactaatattttgaaaactcatgtgaaaaattgccatgtcggtcaccacctttctttaggtttatgggtttgcttttgttgtcgccaacggcgacttctgatacaagggtttagcacaataatacaaccaactttagttgttgtgtgtaagtgcgcattgacctcgtttcactcggtctgctgattatcctgaatttacttttagtgtatgccttccgcttcgctatttcaacttttatactttgacttaacgtttcctatatgatatagtttcggtgattatttcaaatatgattggagggatcattatgtctcaaagtaacttagaaaaacaagaagctaaattaaaagcccttaatcaaaaaattaaggacgaaaaaaataagattgaacaacggctaggtaaacaaatcatcagtcaagccaatttagattatgctaatttgtctaacgatcagattaagcttttagctaagcaattttctgaatttttaaaggtaaagtccgtagatcattaaccatacgcgatggggaaattctatgtctaatcaatatgaaaaactagtcgagcagcaagcgcgtttaaaacaaaaaattgagcgggaagattttaaattacggcaatctaaatattatgaaagtcggcaagaccgcaaagctcgttctcgccgattaattcaaaaaggagctttgctagaaaaatactttcaagctgataacctttcggttgaacaaaccgaagagcttttaaaaacatttgccgattacgttaatgcccataagccgaataagctcaaaaacgatcaacctaataactaggccgatcgtttttattttctggatcattttttggcttaatttctgggttttgatccgcaaaatcttttaattgttcttggattcttttaccaatttcgtcttcaactgatttaagctctaagtttgctctaatttgtaatccttgaatgccattgtcatatgtccaccgtttaattttagccatgtcattagttcgataataattggcaattagttcgttccattgatcccacttatctaacggcacattgattaagcctgcaccaccgtcaatcataattttattagcacttaaagtcgccgtccttttgttcccgtcccaaaagatttgttggcgcatattatgatacataacagtcaatgctttatcagtagtcgttgtttgcggatcagccaaaattttttgtaaaaaggattgttcttgtttttcgttaattaagggtggttcaaaaaagtcttcactgcctaaatcaactcctccttttccttgccgtaattctcctggtactaaggcgtcttccgcggccacaatcttgttaatttgtttttccatggttaacgttaaggaggaattttgatcagtgatatattgccacccacgctttaagttaacaattgtcaaaatatcttcaacaggaacgcctgccacactcatgccgtccataatggtttgtgtttgcggcaaagtggtatttacgccttcaaagcgggcactagtgtgtactagcttggtaaaatttgttcgagcaaaccgtttgttttctgcaactgtaaattgatacttgtccatatatgcttgtgtcttagtcatattttgtgcctccttttcattccaaccactgattctttgactcgtccatgttaaatcacgaaatgcttttcgttgataatttttttcttgccgtttatctaagaggtaagtgtgtaacgcgtcaaacaacttgcgcttatcagggtctggattatgtgccgcttgttcccaaatgccttaaatattgactgtccaggggtcagccaacaattgctctattttttcgacttctttgcttggtttgattatttaaaaagctcccttcactttcacttagttcagtcatcacctgttcaaccacttaaggcacctatttttgcttctaaacgattttaaagcagttttaatataattatgcatgcaacacttaaaacggcttaaatgagtccatatgacgtttaatttcaagaacgctcattgtcagtgttctgttcttcggggtgtttggccgcatattctctagccgcttgtttattccaccaaacgccaaataggttttgcatggtgccgtacaagtagttttccacgttcttgatatgcttttcattgcttcttagggcgttaaagtagcgtcttaaggctttagtcatcaaaggttttagttcttcgtcgtaaagcgggattatgacgccaatatcttgatgatccttttcaactcggtacttagcatttaagataataccaatgaagcgccgcatttgttgcggggtacggcaccaaaaactaagtagttgcacagcttcgggttctaagaaaaccggtaagccactgtcttcatcagttaagaagtcattagcatgatttatgagatcctggttttgtttttgaatttctgctggtgagaaattggctgtggaaaagtccaacttttgagtatctatattgcatctgtttttgtctctttctttaggttctctatatagattaagtccattttttgaacttccgctcgtagcaagggtttgagagcttttttgaccaaattcgccgcgtaaatagacatcggttgctttcacatcgagcttggacagatataagcgattcggttcatttttcttagttttcgggttaaagcccatttgtttctgaacgagtaatccgattgattccaactctgcttttattttgatgacttttccctttgaacaattgaacaagtccattagttcttgattggtaaagataaagtagacgtgtccttcactatcaacccagttattgcgcaaagaatactctaatcggtcttttagtaccatataggctaatttagcgtcattgcttaaatgcttgtattgctcgccatacattaatacctaccattaagtttttttaattgcaatataaattttaagaatttattttgcaattcacgaactaagtgacaaatgtggcgtgaaaatatagcgtattcatgctactacctccaatatttttgtaaatttaaactaaatgccgattaacgacaaattttaataaattaacaaatcatacaatttattaaccgctaacaattatgaatttagttaattaaatttttaacatgaaaataaagcttcttatgtttttcaaacgttgtatatacggtatttaaccctttttgaagaactcttgttcgctttgttcgtatacatcatgacatagcagacaattaagttgcaacatgaaatttaataaaaattaccctgggtactaataattagcctgatagcgccttaaaagttactcccaggtgatagttgccccactagttttatatgctgttatggcacgtttactgcctagttgctcaaactgatcaaacatagtgctaaatacatagctatttaaatcctgtattgcacccaaccgtacttgttggacaattcgcattaaggcatcataaacaggttggtcgatgtcttcatcttgtaaatcaaacaagctgctttgtatctgatgactgtttaatgcttgttttttggcacgtagaattgttttttgaacagtacaaaacaattcaaaatctccgtttgataagagttttaaggctaaaagttgttgtttagaaaagatattgtcgttttctaattgcacttcaaacagcgcagcgtcttgtagctgcttgatattttgaggactgtccgttagagtatctgtttttttagtatctgtatttaaggttttaagatattcagtattattaatatcagtatcactagttaccgtttttcggtaatctagattactgtttttcagcaatctagatttatcaagggtttcaggctgtccatcattcatagatgttggtaaatcaatgtttacaacttcttctgcgagtggattttcagctgtttcaagttgatcgatgccataaatatcgttatcagtaatttccggtccaagtaaatacatacgatttgctttaccttgtcccatacgtttcataactaataattgggcctcagttaattcctttttgattgaagtgatttttgagtgtccgcaaccaagaatctgctctagttgttcgccagtgtaaataaaataaatattgccggctttatcgaaccaatggtttttgattgaaagttggaggcggtcagaaagaatggcgaaagcaagttttgcttcagcactcaattttttatatttgtcgtttgtcataaagaccttaggaacttggaagaatttaagtgcgtattcccgcttaatgttgtaatagttcagttgattatccatgttagatctccttatcaattaaaaagagcgaacccgcatttgcgagtccgctctagtgtttttagagtaggcaaatgcgagcctggttaaaccagaatctcttttgaaaagccgcacgacctacttttatgtatactcaaacaagcctttttatattgctattttgaacaaaatagcctataattaaagacatagtttagaagaaattacagacaaataacttcttaaagttggtcatcacgaattccagttcgtggtggctttttttatttaatttaacaataagttattcgttgtgaaatgtaaagttaaaatatcttccaatgtaaacatgtatacattggaaggcacgataaatattttgtttacttgtattaatgtaaaaaagtaaatatgtatacatttttacacataataatacctataaataagcaatacacaacttttaatactaaagtaaacatgtatacattagtacaatagtacttgactatttgcttacatgtggtattgtatacatgtactaattaaaagggagcgtgaattttatgagcagtcgtgtaattacatttggtaatttcaaaggcggaactggaaagacaacaactagcacaatggtaggaattgaacttgcaagaagaaatttaaaaacgttattagtcgatcttgatcctcaagggaatgcaacaaacctttacttgaagacaaaagaaaacgttgacaacgaaatcgtatcatttaataaaacgttaatggctggtataaaagatcaagatttgagtcaaacaataattaatattttacctaaccttgatgtattaccatctagtgcagacttctcattatatccacgattcatggaaacagtaagtagcgattataatgaaagagtttggtacttttcgaaattaatgaaggaatttaaggaaaagtatgattatattttaattgatattccaccaacaatttcattgattacagacagtgcactatatgcttcagattattgtgtgattgttctacaaactcaggaaagatccttgcaaggggcagaagcatttattaactatatgcaagaacaagttattgatacatttaaggcaccaactctcgatctaattggaattcttccagtccttttaaaaaatggggctccagttgacaacagtactttagaggttgcaaaagagttatttggtagtgaaaatatttttgatattacaattaaaaatatggaacgacttaaacggtatgatgtgactggtgtaatgtttaaagatcagtttgatcatgcagtacagaatgtatatgaaaaagttacgactgaaatgattagtagaataggggctattgaaaatgggtagtttattaaattcaaatagagtaaaatcaaatagtttagaccgtggaaagcgtattgaaccagagaactctatgagcataaaagatttaagtaatccaggcgaacaaagtaagagcagtaagattgagagcgtgacttattacgcgaatgtaagaattaataaccatataaaaaataaagcggaggctctttcaatcattggtgttgccaagtcacaaaaggacgcaattgatcgtgctttggattcttttgtagagcagttaagcgatgatgagaaaagaagttttaaaaatcaattagcaacgctggaagcaaaagatgtaaaaatgaaatctgaaaagtaaaaaaatactaatgtatacattagtatttttttgtagatatactgatgaataaacatctagtatctgttcacatgtaaaaatgtatacaatttttacatgtgagtcgcttgattagtatggaagtgcaataaacttaaacaaaaaaagcaaggtgtttgtacaccctgctaaaagtagaaatattataatttcctgtttggctgctaaatagcagtatttttattgctttattttttctttattgttgatagcaaattttatttcttcagggaaaagctcgggatagttctttagaagtctaccaatttcaaatataattcccgctaaaaactcagttctattttgggctttaaatctatacttcgagcgtgtcgattttcgacacgtttttttgtgctattggatacaaatcatccaataaaaatgaaatatcaaaaaagacggcttccactatggaaagtcgtcccgctacaaaagtattcagtatcgaaatttgtcacatatgcccttattgacgttctcgtctgtaaggtttgaagaagctataaactagtaagccaagaaccaaaagtatcccaatcagtgtcatgccaacattattgacatctccagtatttggcaatttttggccattgccgtgattgccattggtgtttggtggtgtactcttcttaaagttcttcgccacaaccacagccgattcattactgagttgaagcttgatcgtaaacgatattttgtcgttactcagtttataaccagctggtgctgctgtttcaaaaaagtagtagtcacctggcttcaaatcattgacttggatctgacctccatcaaaacggagctaaacaagatagtgcatgacatcgatgactaatactttaacaccaaacagaaaggggctatgaatatatagggtctataatatacaaataccccctcgaaaacgttgaaagaataacccctaatatctataatgtagatattaggggttatttatttttatataccagaaatagcttcttttattcgttattttttcgataccttttagcacgattttgaccaggaaataaacgatcatgcgatccgactcgaatgccaattaagactagttcatctttatcaatcgtgtaaacaaccaggacatcgttagtttcgcttggtattttgtttttcggggtatctcgtaagtgaaattcattatacccgctcattcgccgattaagttcatgatcctcaaattctggtggtaattgttgttgctcaagcaacaggtcaatggctgctcgaacttcatcaataatagatttgtctaaactggctaaccgttttagatcagcattaaaggttgcacgtggtttaaatcttagttttttcattatttaaactggccccaataatcatcatctgattcaacaatttcatcgtcaggtaaaacatggcgtttaattaactgatcacgtgcaattgcatattctaacgaaccttctttagcttttaatgctctttctagccagtccattttttcttgtgaaacaatggctactgcgcgactatttgaacgagcaatataaacggtttcgtcttcgtcattaacttgatctaaatatttttttaggttagcgcgaaaatcgctctgtgttagtgctaatgtcatatttaccaccctttcattgtacttaatattgtactttaatttgtactaaaaatcaatttttttaaggagctaaaactatgcaacaagttgtcttacccatcaaagattcaaatgttctcaaggaggttcaagataccttactcaacaactttaaagctggccggcgtaactatacagtttttcaagttggcaaagcgacactgttacgagttagtgatgtcatgcgcttaaaacaggccgatatttttaatccggacggttctattaaacaaaatgcgtttattcacgaccgaaaaactggtaaacctaataccttgtaccttaaacctgttcaaacagagctcttattgtaccgtcaatggctacttaatcatcagctggattctgaatggctctttccttccattcaacaccccgagcgccatatcacggaaaaacagttctacaaaatcatgagtaaagttggtgagctgttaggcattaattatctaggtacccatacgatgcgtaaaaccggggcttatcgcgtttacacgcaatcaaattataatattggcttagtcatgaatttgctcaatcattccagtgaagcgatgactttagcttatttaggcttagaccaggctagtaccgaaagtatgttagatcaaattgattttggttagttttatttggatttttagttgttgccgaaggcaacttctgagacagattttaagcacaaaacctccactaatttttagtggagtgtaagtgcgcattaaactcatttcattccgtttaatgacgctaaaaaatagctaacttgatcattaaaataaaaggtttttttagttcaatgcgcacttacacgtcaactaactttgacgtgtttcgataccccaaaaattgtattagatttcgctgcgctcaaacaaatctttttaattgctttacaccgtttttctttctaaacttaatcacaatctttgaataactaactataaaaagatgcctttaatttaaacctgaaataattagctaatgttaggagtaactcagatggccgaaaagaaagtattaaaaccaattgatgaaatgcttgctgatccttggcaagttgatattcaagaattgtttgaagcttctgtcaatgaacctgacgcgattaaaaagaatttgtatgattccttatacacttatattttgcaaaaaagacaagaagatattattaatcgtgctggcttcgttatttagccctctaagagcctgttgagggctttttgtttttgctttggtataaatatatataaacagtctcaaaaccgctaaaaacgaaaaataaggcccttaaaaaggaacatagccgctaaattcttgctaagatttagaaaaactaactgtttgctgtcaatggtagcggacgagagcagcgtgggagcataaggaattgacagctcttaaccagtctttacactgaaatggcgaaagccaaagtttctacaaaactttgctttcctgcctaacggcgagtgaaaaaacagtcaagctggctcactcctttgtgttttttgattctaggttttgatctcgtacagtagtgcctcttatatacctcttttataaacctcttttaaacctcttttagacccctttttagtcttactctcccaaggcttatagaagtttatcaacgaggttttgtctgtttatcaacgaggttttgtctgtttatcaacgaggttttgtctgtttatcaacgaggttttgtctgtttatcaacgaggtttttaatggtgatcgttgataaacaatcgttgattttatataatagttgtggaggtgtgattatgagcaatgaacttataaaatatgatcctgaactcaataccattccgttacgtaaattcacccctattgaaatgaatctatttttttcaattatttctcgtatgcgtgataagggaggtcagacagttagattttcttttgaacaacttaaagatttgagcaactataaaccgactgcaaataatcgctttgaagatgatattcaaagaacttatgaaaagttaatgggacttcattttggaagacgtagtaaatctggattaaatagagaaatgtttgttatgtttactaaattcagaattgttggtgaagctgactctccttatatagacattgaagtatataaagatgctttgccacttcttaataatttagacacgtgggttagatatgctttagcggaatttagagatcttcgaagcagttatgctaaaaccgcttttaggttgttaaaaggtttcagaacaaccggttatgcttttttatcaaaagaagatttttttgagttacttgatattcctaaaagttattggaaaaaaccgggagacgttgatagatacgttcttaaaccaatcagagaagaattgacccctctttttagaggcctaactgttcgaaagaaatatggtaaaggccgcgggaaaccagtgattgggtattcttttacttggaagcctgaaaagaaagacgctaacgacttctcagaaggtcaatttcaagatgaacgtcaaaaactctttaacattcagcataatggtgaattaacagagcaggaaaaatggcgcgccattgacaaggttaaggggttaactttaggctctactgagaaacaagcattggctgataaacaggccgagcacgataaaaaaataagagatcaagcaagacaagaagctcttgctgaactccgaaaggggtttggaaatcatgcctaaaactattagagaacttgctgacgaattgaaggtctctaaacaaactattcaataccactaccaaagactaccaacaaagaaccgacaaaaagatagtcaaggtacaaacatgatcagccttacagctgaaaggattattagggacaaggtagcaaagcctttggtagcaaatacccaacaaacaggtagcaaaaaagtgacaaagactagcaaagaaaataatgagctaattgccactctaagaagagaaatagaagatttaaagtctcaacgtgacaaacagcttgctaccaaagaccgacaaatagatcatctaataaaattggtggatcagcagcaacaattacaattagcaacagtagcagataaccgtcgattaaaagatcatgtacaaaagctaagtgggcaactaactcaaaaaactaacgacaacttgtcgaccggaaatgatctttttaacatccaagataaaaaaagcaaaatagctaaacagaagattgttaaatctggtagtaataaagatggcatacacacaaatagagctattaaacgttggtggaaattctggtaaaagttaatgtaagccttaaggtttcaactaaagcaattacggtcaaccataaccatagtattggattgtcattttattggctataaaatagtaaatcagtgaatttcattacaaaagggctcacaaaaaattgttttcttcctccaacaatagcgagacgcttttctaattgcttgacccaaagagcaatagaatcttttgaaggcccaaatacctctgccaatgatttaagttaacgtccttcttggtgaagtttaaccagtgaatctttaaaatcttgtgaataacgaattgacataaaaatacgcctatactttcattttacggactgaataaaaatagtccatttttttagtataagagcatttatcattgattgcatcattaggattgacgacattgattatgcaagatggtgttttccatattagtgaaggatcaccaattattgcatttttgccagtcattatgattggaattgtcttcggtctggcgatggattacgaagtgttcatggtctcacggattagggagacatacattgccactggagatacaaatcgggctgttaaaacaggattgcaagagagtggtccagtcattattacagccgctttgattatgattgctgtctttggaagttttgccttggttgaagatccaacgattaagtcaattggtatttcattagccagtggggttctatttgatgccttcttggttcgtctgattattattccagcgacaatcaagatattcggtcgtgctaactgggtattcccaggagcaaattactataataagtttaaggatgatgcgcaataaataggtattgtggcattaaaaatattttttttgggagtgattttaatcactccttttttgtttgattatgtcgcatttttgatatctttactatttataaaacaatacgaataattttatttttgaggtaataagatatagaatggcactaacttgtcgtttaatattcataaaaattatgggggagtagctatgataaaaaccaagataactagtcttgtcattgggttgattttgggggcaggcttagggttatatggcaatattgatgatgatgttatggctgcaaaaactgatagtcaaacaactaagacagtaaagcaggcaaaatcattaagtcaacagtaccaatataaagaagcaaaatcagtgttatcggggcacaaaggaacaacagttgatcatctaaaaaagagtattaataagcaacagtcaaagttggtcacgtgggatgatccgacaaaaatttcacatcttttttatcattcactaattgttgatcctggtaaagctttctcatctaagcaggcacagggatacaaagattatatggtgaccatcgacgaatttatgccgatgctgaatcagttatatgataatggctatgtattaattaactttaaagatatcatttcgattgataaacaagggaaggtgactttcaaaccagtcaaattacctgaaggcaagaagcctttaattatatcacaggatgatgttaactattatgagtatatgaagaattctggatttgcagataaattagtcgtcaataagcaaggtgatgttaaaaatcaatataccaataatggtcagaagaaaattggtgattatgacatggtaccgattattgataccttcatcaaaaagcatccagatttctcatacggtggctcaaagggtgtgattgctgaaacgggttataatggggcgctaggttatcgttcatcaaagagtcaatatggtgatacaaaaaagacacatcgcgaagctaagaaagcgacaaaggttgctaacgctatgaaaaaggaaggttggcagtttgcatcgcattcctggggtcatataaatatgactacggccagtgttgatgatatcaaaaaggacactgcactttggcaaaaggaagtacaaccaattgttggtaaaacaccagtattgattttcccatttggagcagatattggctcatttacaaattatacaaatgataatgcaaagtacacttatcttaagagtagcggttttagtattttcgataatgttgatgcgtcacagacatcatggggtcaattaacaaatgattattatcgtaatgcgcggataaatgtcgatggtattcgtttacatgaaacaatgactggtgagaacacggttctaaatgacttctttaatacaaaagatttttatcatcgtgataaataatgaagagcgcgagacaaaagtcgtcaacaaaaaattgggttatttttcaaacagttagacaacactatcactcttcatcaacgtaagttagatttgttgaaagaacagaaaaaaggctttttacaaaagatgtttgtttagggcctatattagataataacccctcaaaaatactattaaaataaccctcattatctagtgattagataatgggggctgtttctttgttaagcgatataataaaccataaaagaagtttagaaatacggtcctggtcatcaataaataaacaatttaattaattaattatttaattaattatttaatttcagaaaggtacatataaatcatggcacaacaaattatcctacccatcaaagactccaacgtcttaaagatggtacaagatacacttctcgatagtttccgtgctggtcgccgaaattacaccgtttttcaagttggtaaggccacgctactacgtgtgagtgatgtcatgacattaaaaaaatcagatgtctataatccagacggctctgtcaaaaatacagcctttattcatgataaaaagaccggtaaagcaaacacgttatatctaaatcctgtccaacaagacttgttgcaatatcatgattggctggtacaagaaaacatcaattctgagtggttatttccatcgacagcccatcacaatcgccatatcactgagaagcatttttataaggtgatggcgcatgttggtgatctattagacattaactatttaggtacccatactatgcgtaaaacaggtgcttatcgcgtctatacacaatcaaactacaacattggcttagtcatgcatttattgaatcactcaagtgaagccatgacactgacttatcttggattagaccaagctagtcgcgaaacgattctagggcataatccgagataatcaagtatagggttttttattatgaaagctaagagatactcaactgaatttaaatcatcaattgttgccttgtacaacgagggtcgtactgctaattcgctggccaatgaatatcatttggctgtacaaacggttacgggctgggtcaaaaatctcaaatcaatcccaactgctcttatactaaaaatagtccatttttttagtataagatcatcatgtcgaacacagtagttaagcttcttagcgccgatagtagttggtgggaaactacctgcgaggataggacgttgccacgcaaattaaaaaggttggacctcagggttcaaccttttttgttgtctattttagaataattaaatgattgttattagtaaatattcttggtataatgttgttgaacaagtggggtcgctccctacttattcttcatcttaaccgagtgtttgaaggacacaatagtaattggaccctgtatagggtgccagtaaagctctagcccctaatcatttatgattaggggctatctttttgtatataatgttagcgttttaaaatgtgatttttagggtatttttattgatttgatacatagtggtaatagttgcttgtaatagatataatgacagggaaaggtggtgagaaaatgactgattttacaataattaccggtgatggaaaagagaaagtcttatcatacgggacacatagattaaggcaacatgtaaatacaattatcagtaaagaaccagttatgataagtattgaatatgggaagcatgatatattcatccaagccgtacctaaaaaatgatattaaaattgattagtgcagtaagttattttaatattcttatctctctatattgggataaggatttccagaatataagtatgggaaaatagttgtaaataggaataattaaaataacctattgtttcctttaattattattagttaagatgaaaataggttttgacctttagcgaagagcaatataatttttttagaaaaggagtggatttaatgggttacaaaattgggttggatttggggattgcttcaattggctattcagttttagcgaccgatgagaacggtgttcccttcaagattttacaaatgaactccgttatattcccaagagcagaacaacctaaaacaggggcttcattagcggcgccacggcgtgataaacggggattacgtcgacgtaatcgacggactaattttagaaagcatcggacgaaacggttatttattaatgaaggaatattgtccgagaaacagattgaaaatttatataaagatcctaaatttgaacggtcaatttatgaattaagagtggccgggttagatcggctattaacaaatgaagagctgtttcgggtactttattatttcgttacacatcgtgggtttaaatcaaatcgtaagtttgaattagatccgagtgacccggctgataaaaagcagatggggttattactgaattcaatcgaagaaattaaaaaggacctagctgaaaaggattatcgaacggtgggggaactttatctaaatgatgccaaatacgctgagcataaacggaataaagcgtatgttgatggttatttaggaacgccgagtcgggatctattatatgttgaaattgaaaagttgtttgcagcccaaaaatcatttggcaatccagtaattacggctcattttgaacaggtttatttatctggctatacagataaaaacggacaggaacacgccggtatttttatgacacaacgggacttcgatgaaggccctggtgcaggtccttatgctggtgatcaaattttaaaaatgattggtcggtgtacgtttgaaccaaatgaaaatcgggcggccaaagcaactgccacttttgagtattttaatttattgcaaaaagtaaatagtttacagtatcgagaaatggttggtggcgactttaaaccactaactggtgagcaacgggatctgttaatccaagcagcttatcagaaacaaacacttaaatacacgcaaattcgtaaattattgaagttaaacgatgaagctagttttaacttgttaacatacagtgccaaagaggataagtttaagactgaaggcaccaagtttattgcaatgaatgcttatcataaacttgccaaagtattaccagaggaattgatggcaaatacggctttattggatcatatcgggtttgcgctaaccgcctattcaagtgataaacggcgtcgtcgatattttgaagaagaattaaaattaccagaagctattattgagaaattattagggttaaacttctccaagtttggtcatttatctctaaaagcaatgcaaaatattattccatacttagaaatgggtcaagtttatagcgaagcagctgaaaatgcaggttatgattttaagtcaaaacaaattaattttgatgaagatatcacgaatccagttgttcgacgcactgtttataaaacaattaaagtcgtaaaacaaattattagacgttatggtaaacctgacagcataaatattgaattagcacgcgaacttggaaagactttggaaaaacgaaaagagatcacgaagcaacaagaagaaggtcggcaacgtaatgaaaaagttgctgagaaacttcgagaattaggacttaatgttaatggtgaaaatattattcgctacaagttatttgaggaacaaaatgaattcgatccctatacgggccaaaaaattaagttaacgcaggcatttacgggtagctatgatattgaccacattattccatatagtattagttttgatgatagttatgggaataaggttttaacgagttcagccgccaatcgtgaaaagggcaaccggattccgcttgactatctagcagatcaaccggatcgcattactaagttagaagcgattgcgactaattcgattcacaatccgcgtaaacgggataagttattgaagcgtcaattgagtaaggatgaagtgtcggggtggaagaagcgcaatattaatgatacacggtatatttcaaaagtactctacaattacttccgtaatgaaatagaattctccgagacgctagataagaagcaacgtgtattggccttaaatggcgaggtgacttctaagattcgtggccggtggggaattcggaaggtccgtgaaaatggtgatgtgcatcatgctgttgatgcggttgtcattggcgctatctcacctacatttatccgtaaagtaactcattatagttataaccaagaagtgaagtataataaggcgctttggcatacagaggaactaaacgataatgagtatgcaaaagaaagtcaaaaattaaacgcgaaattgtttagtaaaattttcaatgactttccattgccctgggatcaattccgtgatgaattagaaatgcggactgcttccgatcctgccgaatttagtaagaatcatacttggcaacattatacggccgaagaattagcggcattgaaaccaatatttgtcgtacgaacacctaatcgaaaggtgactgggccagcccatcttgatacgattcgaagtggtaagttattaaaagaaggtaaggttatttcgcgcaccgcgattacgaacctaaaaattaataaaaaaggtgtactaggaaccggtgatggtccgtactatagtgataatggtggcggatcggttgttgaaaaagctttaattgaagctttaaatgcacatgataatgatggcaaaaaagcatttcctaatggttatttggagtatatggatcacgggaccaagaagttggtccgtaaagtgaagtttgttaaaaagacgacaatttcaaccgttttggatcaaggaaaatcggccgctgacaatggttcaatggttcggatagatgttttcaaaacaccaaagaaatatgtctttgttccgatttacgtgaaggatacggtggaaaaggaactacctaatctagctgttgttgcgaataaaggatatggtgcttggagtaaaattgaatcaaatgatgaattcttattctcactatatcaaggtgatatgattcatattaagtcaaaaaaagggtttaagccgaagtacaataaagaaaaactagattccgatccagaaacggtagcagatttttatggttattttgacggtgcaaacatagctacagcaagtattcaagtaaaggctcacgataatagttattctaaagatagtattggaattgctagtttgctaatcttcgaaaaatatcaagtcgattatttcggtgaatatcatcaagtgaaagagaaaaaacgtttaacttttaaataaaagagatggtttaatgggctttcgtaatatttatattcaaaaaccgactcgcttaagcattcggcggcaacagttggtgattcagcaagaggaagattatacaataccggtcgatgatattaatagtattatgatcgatcatccacaatgtacaattacaacgcctgccttatcggtattagcagaggctgaagtggcggtctttacttgtgatcaaaagcatctcccttgtgcaattattttaccggttggacaatattttaagaaatttgaagcattgacgattcaaatccatgttcgttcaaaactaaaagaccgactttggcagaaagtaatgaaacaaaaaattgctaatcaagctaagtgtttagcgctgaatgggcgaccgtctgttgagcttgaagtaatgggcaaacaagtgattgaaggtgatcgaagtcatcaagaatcgcaggcagcacgactttattttaggttattattcaatgatcaatttacccgtcggacagatgatgttttaaacggtgcattgaattacggttatgctattatccgtggcgcagttgcgcgtgatatctgtgcatacggttttgaaccagcactaggattattccatcataacgaattaaatccgtttaacttagccgatgatttaatggaaccatttagaccatttgtcgatctgtgggttagtcaaaatattgaacaattggaaaaggtattaacttcggaaaataaacaagcactgtttgcactattatttacagaagtattgattgatggtgagtatcatacgctaaataatgccattcataaagtagtttcctcgtatacgatgtgttgtcgaaatgattcagctgcaggactaaaattgccggaattagtcttattgcgagctcacgagtatgagtaaatatatgcgtttattagtgatgtttgatttaccggtggttaaggcagaagatcggcgggcggccagtaaattccggcagtatttactgggcgaaggttatgtaatgatgcaatattccgtctattatcggattgtgaatggctatgatatgtcaaaaaaatatgagtatcgattaaatgataatttgcccgaaaaggggtcagtacgattattgattgtgacagagaagcagtttgatgaaatgcggttacttgtaggggatcggctacctaatgaggaaaaagttgatgggaaccagttgactacattttgaccatcaaaaaaggctcgatatcgttatgatatcgggcttttttagtgaaggtatttcatcttaaccgaatgttgaaggaaacaatagccactaagttataattaacaaagaccgttaaatttcatcttaaccgaatgttgaaggaaacaatagctcaaatcaaacagttgcaagatgataaagatttcatcttaaccgaatgttgaaggaaacaatagcaaccatcgtgaccgcgccactagtattagatttcatcttaaccgaatgttgaaggaaacaatagctagatggagtaatgcaatttaatgtatggaatttcatcttaaccgaatgttgaaggaaacaatagcagctgtgtgtaatcccccatatttttctacatttcatcttaaccgaatgttgaaggaaacaatagcagtcatcagctttcaccctttcaaaagcttatttcatcttaaccgaatgttgaaggaaacaatagcgttacacgacaatgctcaatcataaagataatttcatcttaaccgaatgttgaaggaaacaatagcaccaatttcggaagagactcttgttcgaccctgatctgatcaactatttgtgttttctttcgtcctttgaggttccgaacagggtcattgatttttttaaggtttcgttctccaattttgcatcatataattcttgattctttttcgtcaattcttcacgaagttgatcgatttcgttcttgtttactaacttacgtaatttcttcttaacactttatttgctggctctgttttttctcattgctttattttagacaattttacttcaatgtaggcaaaagaattcacagaccattgccattaattgataacgtttttcagatctcctgataaatatgcttttatattatcaacagtcatatgcaacaaccgatctcttgtctcatatggtgcccaagcaatatgtggggtaatataacaatttttggcctgtaataatgggctatcactagcaatgggctcccctttaacaacatcagtggcgtaggcataaattttgccttcattcaaggcattcctgatgtccgcttcattaaccaatttgcctcgggccgtattcaatataataaccccatttttcatttcggcaattgtatcattattaattaaatcaattgtttctggtgtttggatcacatgcagactaagcacatcagattgccttaatagttcatcaaatgaaacctgctgaatccatggttcaggaacctttttaggacgatgattatagaaaataactttcatagaaaaagcgtgtcctgttttagcaacttcttgcgcaatatggccataactgattagccctaaagttttgacttatataaaacaaggtgataggctgtcttcagaatctgaaaatatcacttttacaaaaaggaggaattttattatggcaaaatcagttgcagttttggtgactaatctagtcgaagacgttgaatatactgaacctgtggaggctcttaagtctgcaggacacgaagtgacaacgatcagcttcgaaaaaggcactgttgaaggtaagcatggtactcaaattaacgttgataagtccattgatgaagtgagtcctcaagactttgatgccttattcattccaggaggattttcaccagatcaattacgtgcggaccaacggtttgtcgaatttacaaagttctttttggcaactaacaagttaacagcaagtatttgccacggtccacaattaatgattcaaaccgggttagtgcaaggtcgtacaatgacagcatatttaactgtacaacctgatttgtattatgccggtgcacgcattgaagacaaagatgttgtgatcgatggtaatctaattaccagtcgcgaaccaaaggatatcccagcatttaatgatgccttcctatcagctttataatgttgatattgataagcattcaaacctatagcttgatgagtttgcctcttttaaaataaatttttaaacagttaccgttaaagtaacttattcctcgtgttagtaacacggggattttttatatagacgtttttaaacccccgttgcgcaattaaactgaacttatatttctaaaacatactaattaataaaaggctagttactgaccaatttttggttagtgactagccttttattttattcataagcgttgttgtaactgataagtaatatcttcgtatcctggcttccccaacaatccaaacatattgcgcttatatgcctccacgcctggttggtcaaatggattaattccattcaagtaaccagaaatggcaacagctacttcaaagaagtagatggcttgtcccaaagcaaattcattttgcttgtccacctcaataatcatgttaggtacaccaccgtcaacggggggcaacaaggttccttctgaagcagtacggttaacgtagctcatcttctcaccttgcaagtaacccaaaccgtcgtcagaatccatttctggaatcacaacgtccgtcactggctcagttacgcggaacaacgtctcaaacaagttgcgacgtccgttttggatgtattgtccgaaactgtgcaagtccgttgagaagtttccagtcgctgggaagatacccttgccgtccttaccttctgactcaccttgcaattgcttccaccactcaccgaattgaaccaacgttggatcatagttaatcaacaattctgttgtataacccttccggtacaagatgttacggtaagcagcgtattggtaagccggattatttgccaaatcggcatcagcgtattccgcttcaccagcagctgctccagtcatcaattgctcgatgtcaccaccagcagttgcaattggcaacaaaccaacagccgtcaaaactgagaatcgtccaccaataccatcaggcacaacgaactcttcgtaaccttctgtatcagccaatgtcttcaaagcaccacgttttgcatcagtcgttgcatagatgcgctcacgagcgcctgcaacaccatatttctcttccaacatttgcttgaacacacgaaatgcaatcgctggctcagtcgtcgttcctgacttggaaatcacgttaactgagaagtcacggtcgccaattaccttgatcaagctgttcaagcaagctggtgcaattgagtttccagcaaacaaaacttgtgggaagtcacgttgcgttgctcgtctagcaagtagttgttgaaatattcgttcaagaagtcaattgccgcacgagcgcccaaatatgagcccccgattccaataacaaccaaaacctttgagtctgattggatcttctttgctgctgcttgaatacgagcaaactcatccttgtcgtattcagttggcaagtgaagccagtcagtgtaggttgaaccagcccccagtccccttacgtagcatttcattcgcaactgtaaccattggttgcatcatggaaatttctgcatctaaaataaattttttctagatgttgggtcttaaattttaatatagaattattcaagattagcatgcctcttttttaattcgaattcggaaatattaaatttattcatatagttcatgacaaataaatctccatataaccaaacagattgttcaaataaacttcccattggctgttgtgttatgtcgttattagtaaacttacttttacctgatagtatagtgacatagtctgcttttttatagattgtattatgcgtggttgtactccatagccaaactttcgcaccaatattttttgcagtatcaacatattgaattaattgactcgtttctccagatgaagaggcaataattaataagtctttatcctgaatagcaggtgtagttgtatctcctacaaaaaaagtctctttacctaattgcgcaaggcgcatagcaaaagcctgtaatgctagtcctgaacgtccaaatcccgtcaaaaaaattctattagttgaattgataaccactaataactcatcggaaatatttttatctgaattattatttagttcataaagtatgctttcccaattcataacaaactcctatattatccaagcaatttcttgaattcagctgcggctgtggctggatcatctactgtagaaattgctccaccaataattaatagatctggattagccgacttaatttcctccgctgctgttaatttaattccaccagcgattgcggtctttgtattagaaacattgttcttaatgatattaaaggtttcaaagggatcttgacccaaggcttgtagatcataccctgtatgagtgccaatataatctgctccaaaagcatctatttcacgagcacgggttgcaacgtcttggaccccaatcatatcaaccaacaactcttttccagcttcatgagctgcttttacagcgtccttaatagattgatcttcggcaacacctaaaatcgttgtaatatcagctccgtaagcaaatgcctggttcacttcatatgaagcgacgtccatgattttcaaatcagcaagtaacgtaatctctggaaattctgcacgaattttttttagtccttcaagtccaaaattaattaccaagggggttccatattcaaaaacatcaatactatctttcgtcttttgaattaaatcaatggctccttggacatcttctaaatcaattgctaattgtagtttcataataaaataacacctttctttttaagaatatatatacattatttaccttactggtaaaatttaatagagggcacttcaaagtaacctagtgtctctttatatttattgttcataaaggagtagtatgatgccagattattttcgaaatactgttatgaaaaaacttactaatggtgattttgattgtactaaagaatttacagtatcaatgtttagcggtaagcataaattattaatattatggatcttaataaatgatgggccacatggcttttcatattttatgaaaaatctgaagggcatcagtaaaaaagttttatcaaaccaactgaatgagttaatggcggaccaaattgtttataaacgagaatacttaactggtaaagtaaaacacactgaatatcaactaacggatataggagaaactttaattcccatcatagttgctttaaatgactggggagaaaatagactaaagcaggttactttagtgaaaacttttaataatgatttatagatttttatctgctgtttaagatgccagcagcttgccccacgcgggcagcgttctgcatgacatgctctcactgaaagtgatcatgcaatgataaattgccccgtcatggcgtgacccgccggaggttttacaagccggataataggcgctgtaaaatagcagtttccccagtaggaaggggaaacgctactgtcagcgcttgtcgatgacacgcctcgcagagcctgtccaaaatagcattttggtataacaagctataccagactataccagatttttaacggtgttatactggtcttggaaaacctttttcgaggaggcatttttgatggcgcatttaaagaaaaatacgcgtggcgcagtccctggtttagcggtccattttgaacgtaaaaccgatcatcatactaacaaagaaattgatgtgtcgaaaacctatctgaatcaagagctcatggctgatggttctgatatgctctcacgattcaatgcgcgtttaaatgacgtttattgcatgaaaagagacgatgtaaaggcgttagcgacttggattgtcactttacctgaagaactcgcagaagcgccctacgagcaacagagcgccttttttgaagcaaccaccaattttcttaatgaacgttatggtcaagaaaatgccgtggccgctgtcgtgcattatgatgagaccacccctcacttgcactatgcctttgtcccagtggtttttgatgataaaaaatcacgttataaagtatccgctaaagaagtgctaacgcggcaggatttgcaaacctttcatgaggatttagatcagcatttaaaaaaggagctgcccttttatgaacaagggattttaaataacaaaaccttaccgtttgagaatgtcgctgaaatcaaaaaatacaatgaattcatatccagctggcgctgctgtttcgacaaagtagtagttgcctggcttcaagtcattaaccttgatttgacccttagcatctgtcgtcaaaccactagcaagctttgtgccgtccttcttatacagatcgaacacggcaccggaaagaactttaccagtatcaccatctgtctttgttagaagaacgctccctaatgctttatcatttgtgactggaacttttaattgaatactatcgctattaattgtaaaggcatgctgaatatcatctagcttatatccatcaggtgcctttgtttcgacaatataatagtctccagcattaagaccggtataacttacagtgccatctaatcccgtcttaagattcgaagcaaccttagtcccgtctttcttataaagatcaaatattgctccagctaaaggacttgagttatcagcatcagacttttcaatcgtgaccttacctttttgattagtggcagaaaccaagacattattatcagcatttgcttctttatactgaagattgatttcttttccatttgtcaaactggtagaaatcacatagccatctggggcctttgtttcaactaaaatgtattttccagatttaagattattccatgtgatactgcctgcagcatccgttgtccctgtacgaagcttctgccctttttgtccggaaacatccgaccaaagttcaaaagaagctccagcaattgactttttggtgtcagcatcactcttggtaagaacgatattggtgttcttacccgttgccgatccgtagttgtttactacttgtgtcgatccgttggtattgttatcaacatccttttcgcccttgcctgatatcgatgctgtgtttgtcaacgtatcattaatttttgacgaattgatcagtgaacgataatgaatcgagtaagccgaactaatttcctttgcaaaggaaatcttcatcgtttgcttaccagttacattatcagtttgcagatccacagagtaatccttaccaagtactaatggattactcgtatcttcagtaaagtcaccattagcagcgaccttccctggatagatcacaatagagctttcgccaataatttgattgtcagaaggctcatcggtaacaactgcatcgctgaaagttgactgtgctttattgacccatatcgtccacaatgcataagcagagttcgttgggtcttgtttgccacttttatccagaacattgccactgtatggcactgtcaccttagccgtcaaatcactagattttttgttatttgtataggtcgctgtattgtcatacgacttttgatcaatgaccttaccagagagactagtttggtaagtcaagacataagccttagaactatcatttggtaatttagcagtaagctgtttctcggtactgtcaaaggaaatattagcggaagcaacttgtgttcccaaaatatatgagccatttgtgttaatagaagcttcatacaacttggcgctacctgctacatagtcttggtcaccaataattggatcagtaatagaggcattgctaagtttacgttgattatagttagcaaccacggtccaagtaatttgtttagaaacagcattataactccccgacttgctgccatcatttttaaactcagtcttaggggtgaagtctgcctgtcccttatttgtatgatcttggccgtctttatcagtccaagttgccgtagcagtgttagtccacttacccccattcggaaggctattcgtttcaaagtcagttttataactcagagtataccaacttgtagcatgcttttttaaagccttagcgaaggatatggtaaaaccgttcccttgcttgctaatcacatagtccgttccttcagtgagggttgtattatgatctttatctttcagaacaaagaaatcataatctacagtcagcccatccgggactggatcggtcattgaccaattgctcatattttggcgggccatattgatatcaaagttccatgtaacagtcttagcattatagtcaacgctaccgagggacttagttagtccctgctgtccgactgaattattttcagaattagaggtttggccgttgctatctaccctgttactaatcttttggcctttatcaccaattgggtctgttacttgtgactgatatgaaattttgactcccttgttcagcccattggggaaaacaatagtcatttcagttctatcaacattgtaagttactttatagtcatcagtactgataggcgtaccagcctcatcaactaatgaaagcttattgtcctccgggaatgtttggcccgttgataacgtatctaccaacttagtattggcagaaagtgtcttttcgccataattgtaataaatatgccaattatacttttgactaccattcttatcctgaccgtcaaaactcttgtttaaaagtttcccgtagttagcctttactgtcgcactagctggagagtctttatcaccgttagttaaggtagcattgttcgtaaaggttaagattccgccattatctggtaatttactcgaatcgatgtcgctagtgtatgcaatcttaaaagcctgataggtatctgcatatgcaccaacaaatgtgatttttccattttcaaccttgtaatccgtaccttctttaaggggatcgccagttttagtcacattccccttcagattaactgtcaagggatatacactaaccgatttcagcgtggtcggcacagtgttggtagtatcacttggcattggatcagaaattgttgcattctttagctctttaccattggtattaattgtgacgttccacgtaatccctgttgggttatttccagatgtgttagccccggttagttggccagttttagcaatatcattgccacctgatggatggacaacaatcggtatcgttaccggcccggtagtcgtgtcaatcacaatgttttctttgccagacgatgaatcactgctgatggtagaagtataaccaaatgtcccttcaatgtggttcacgttttcaacattgctattaaaggtgaacttaactgtgccgtcagaagctatgctataagatccatagtcaccgagtgtccccgtacctggtttataggtaattccttcaggtaacttaaatgagaaatagtcaccatctttaacttggtagccatctttcagctcatctggaattgcccatgtatattgaaaattaagattagtatctttagtcacctgtgtagggtcaactttattacccttgtcatctgtaaattcaatctgtgttccggtaatgattgttcctttggagtcatctggcaaatattgtgaaatatcattgccttcagtactctcagaaactgccttttcaccttggcttgtcgccgtaacactaggcgcagctttgctgctagcattggtcgaaggcttatcagcttttgttttctcaatagaatcagtcagctttgcaacaacattttgactatccgtcaaaaaattgacagatccttctaaggatgaagcctccgtgagacttagttggatagttgctgtgccagaaacattacctaaaacctctaactctaatttgttggccgaataggtatatttcccgacaactttttgattggcatcaagaatattagaattgctcgtatctttcagttgctgattgttagaaacagatactgaaacttccttatgaatactttcatctgttgaattatttaatgaaagcttcaggtcaatgttccgtgatccagcagcttcttgagttgcccctagaagttgaacctctgtcgaatcatcggccgcactggagctagatgtaacggctcctacaacttgagctgatgattgtaagaacagcaaaaaaatcagaaccaaagaatatatttgctgtcctattttcttcttgttcatagtttacctccatttcgaaatagtctaatttttattttttgaacccaattttaacaaataaagtttgcccctctcctttctaaaaaaacatatatatgtatcctataagtcgtggattcagtcacaactcgaaagatttgagctataggtcacacatattaaacatataacaatttttttcatttcaaaagccaaacattgcacctttggttaagtcctcgaccgattagtactagtccgctccatacatcgctgtacttccactcctagcctatctacctgatcatctttcaggggtcttacttccataaaggaatgggaaatctcatctcgaggggggcttcacacttagatgctttcagcgtttatccctgccatacatagctacccagcgatgcgcctggcggcacaactggtacaccagaggtatgtccatcccggtcctctcgtactaaggacagctcctctcaaatttcctgcgcccgcgacggatagggaccgaactgtctcacgacgttctgaacccagctcgcgtaccgctttaatgggcgaacagcccaacccttgggaccgactacagccccaggatgcgatgagccgacatcgaggtgccaaacctccccgtcgatgtggactcttgggggagataagcctgttatccccagggtagcttttatccgttgagcgatggcccttccatacggaaccaccggatcactaagtccgactttcgtccctgctcgatttgtcaatctcacagtcaagctctcttatacctttacactctacgaatgatttccaaccattctgagagaacctttgagcgcctccgttacactttaggaggcgaccgccccagtcaaactgcccacctgacactgtctcccgccacgctaagtggcgcgggttagagtggtcatacagttagggtagtatcccaccaacgcctcaatcgaaactagcgttccgatttctacggctcctccctatcctgtacaaactgtacaaacactcaatatcaagctacagtaaagctccatggggtctttccgtcctgtcgcgggtaacccgcatcttcacgggtattataatttcaccgagtctctcgttgagacagtgcccaaatcattacgcctttcgtgcgggtcggaacttacccgacaaggaatttcgctaccttaggaccgttatagttacggccgccgtttactggggcttcaattctgggcttcgcttgcgctaactcatcctcttaaccttccagcaccgggcaggcgtcagcccctatacgtcatcttacgattttgcagagacctgtgtttttgataaacagttgtttgggcctattcactgcggctgacctgacggtcagcaccccttctcccgaagttacggggtcattttgccgagttccttaacgagagttcactcgctcaccttaggatattctcctcgaccacctgtgtcggtttacggtacgggtagtttatttctcactagaagcttttcttggcagtgtaacatcaggaacttcgctacttaatttcgctccccatcacaacttgtccttaaagaatcaagcatttcactcaactcaagacttgttgcttggacacacatttccagtcgtgtgcattccttagcttcctgcgtccctccatcattcaaacaaaataaactagtacaggaatatcaacctgttatccatcgactacgcctctcggcctcgccttaggtcccgactaaccctgggaggacgagccttccccaggaaaccttagtcatacggtggatcagattctcactgatctttcgctactcatgccggcattctcacttctaagcgctccactagtccttacgatctagcttcatcgcccttagaacgctctcctaccgcggacacttacgtgtccacccacagtttcggtattatgtttagccccggtacattttcggcgcagcggcactcgactagtgagctattacgcactctttaaatggtggctgcttctgagccaacatcctagttgtctgtgcaccgccacatccttttccacttaacataaattttgggaccttaactggtgatctgggctgtttccctttcgactacggatcttatcactcgcagtctgactcccggaactaaatcaatggtattcggagtttatctgaattcagtaacccatgacgggcccctagtccaaacagtgctctacctccatgatccaatattccgaggctagccctaaagctatttcggagagaaccagctatctccaagttcgattggaatttcaccgctacccacacctcatccccgccattttcaactgacgtgggttcggtcctccagtgtgttttaccacaccttcaacctggacatgggtaggtcacttggtttcgggtctacatctatatactcactcgcccatttcagactcgctttcgctacggctccagcttttcactttaacctcgcatataaacgtaactcgccggttcattctacaaaaggcacgccatcactcattaacgagctttgactaattgtaggcacatggtttcaggatctatttcactccccttccggggtgcttttcacctttccctcacggtactggttcactatcggtcactagggagtatttagccttgggagatggtcctcccggattccgacggaatttcacgtgttccgccgtactcaggatccagaacggaggtcaagttgtttaatctacgtggttatcacactctttgactcagcttcccagctgattcgattacaacttaacttggtaactccaaagttctgtcctacaaccccaagaagcaagcttcttggtttgggctcttccccgttcgctcgccgctacttagggaatcgatttttctttctcttcctgaaggtacttagatgtttcagttcccctcgtctaccttcattaagctatgtattcacttaatgataatactcgattaaaagtattgggttcccccattcggaaatctccggatcaaagcttacttacagctccccgaagcatatcggtgttagtaccgtccttcatcggctcctagtgccaaggcatccaccatgcgccctttataacttaacctatctttacctacggtaaagggttattatttgagtttagcgatatgaactaattcatatttctattattaaaaaactctttaaaacgcaatgtttttctcggcttttaaaactaatatattacttattatccagttttcaaagaacaaagttcaccagaataatctgtgggacagtcccagccctcaccctttagcttggcagctacagcttgttcaaatttatcttccgctatttaactagtcttcttttcttttttagttgtaactatttaccaaaacgccaccactttttaggtttaggttgtgactccggggtgctattttcaggttccggttgtttgtctgacgtcacttctttttcaccatcatcatgcggtgccatcgttaaggctttcaagtccttaatttctgccttgtattcttcgagcagttgtttgtcctgtaaggccaatctttgttgctggtctagtaatttatgtaactctttcttttcagattgaatttctgatactaaattgcgaaggaatttcacttcatcttgatcataaacagcatctttttcgttgtcgtcaatatcatctttatgttgatgttctttggttgatgaaccatttttaaacattgatttaatagtcttttggccgtcaacattaacgtaaacggtattaccttttgttgatgtaaattgacgtaaatcgattgacgtatctctttttatcttttgccatatggcctgctttgaaacgcccaattcatcagcaagttctcgaatcgtttttaaattttcactcatggtctatatcctgccttttaacgattggtagatactgttcaatcgattttttaagatacttagcaatattgtttttcgaatagtcatcttgtttatctcgaatatatgctaagtgttctttcacgccctttaaaccacgtaactcttttaattcgtcataaagtggataaacatttttctgtagccctgacaaaatagccgtatccgtcaaatcaatgtatgacaacaagaaatgttccatcaacaattttgtatatggactcttcatagcttcatatacaagatctttttcactttcttcttgtcttatcttaccgtcaatataaacgggatcatctaatttgtaactaatatcatctgcgacttggtttttagtgatatgaaagacaatactttcaatgctgcgtccttttttaactttttcatatataacattaaagctggtatgatttgtgatttctgctagaggttctttcaatactctcgtttcaaagtgagtgaatcgtttgtattctgttatcgtatcagtcatttctcgtaactctttcataccaatttcaggattacggtacctgtcaatttgttcttctcggcgtccacctttaatactatagtgctcgtattggttgtaattcatcgataaccaacgatacaaaataacggcatatttactattcaattcggaaatttctgacaaggcatgttgtgtaaaattggttttgagattaattaaatagggcataatttcaggactaaatcgaattaatacctcatcatgataatctgtccattctacatatggaattggcacaatgctaacaaacttaaaacctttatcttgttcttttttaatctgaaaaaaagcctgtttttgcattttttcaattgcctctttaaaacgactatgcttatcgttgtcatccactttaaagaaagcaaacatttctttctttgataaataaaccgtctgatcctgaggtggattgtcggtatcaattaaagacaccgctagttcaaacattttgagtggtgtcttatccatcttggcaatcgacgttattaaactattatgttcaacgacttttctttttgataattcattcaaggtctgtacctgccttgtctttgattctggtataatagtcatataaatacactcctttgggtgtgttgttggataagcataaagaaaaacttttagacgggaatttctttatgcttttattataacattatatagccacttattttatttttttgtggctatatacacagttttttgtggttatgtacacagttttttgtggttatatacacagttttttgtggctatataatacgtgaatgcattgttattactgtatttataactacgcaaaagaacaaaagattaaaatataaaagatatacttataataggctacgcctttttattgaattaataaaaacaaaacaaaaagaacaccgttgtacataatgtttgtccagagtgttctttttgtttggaattattttaaatgatggattactggttatgtaacctgattgccacttattaatcccatagcgacgttttaatctatttaatgattatttctacgtcacatggctaaaaacgcttatacgggcaaataagccgttataacgttaaagacttggccccttaaaaatatcacgcgttaattcaatgatccgattgattaatgctttaacttgttcaataccccaatctaatctactaggcgctattttcgtatctggagcttctctagctgtcgtcaaggtttttaaccatgactgggccgttttcttattttttgtcagttcttcatgatcaagcttataaaggacatagcgggcctccacatcagtaagggatagtttgtcgacaccataatcatttttaagcatatcgcgcatcacatagtccatcttttgcttttctcgttgatctgcctgcagcgtttgatgtgctgctttcagtttttgatagtcttcttggacagctgctaattgcgcttcgacttgtcctaatacttgcttaacttgttccgtctcattctggctttgtaaagtggctttcttcatcgtggctaacacgcttttaaagcgatctaagtcatcgggtttgagcaccgtcttaccaaagagatttttagataagtcttgtttaaaatcttcaatttgtttttcggctaagtctacttctgttaaggcttgatctgtaattgtgagtaaggcctgtttagccctaatattttcttcaacgtcagctagttcatccttcaagacgttaaactgatcattaaattagggcctagtacttttggaatggaaatactttccaacaccaaaaattctagacccgattatttttgttaaacgagatttctatatataatggaattataaatttactgttggaggtttttatgactgatttatttgcagatggtactatctctatccatggagctcaagaaaataacttaaaggatgtcagtttagatattcctaagcataaaacgactgtatttgctggtctttctgggtctggtaaatcctctttagtttttgatacattagccgctgtttcccgacgtgaattgaatgaaacttttcctagtttcacccaacaatatttgcctaaatacggtcaacctgaagtgaaccgaatcgacaacttaccagtggcaattgtggttgaacagaagcctattggtcgtaattctcgatctactctggcaacctacaccggcatctattccgtcttacgtttgatgttttctcgaattggacagccttgggttgggtattctgaatggttttcctttaacctacctcagggaatgtgtccaaaatgtcagggattaggctttgttgacgacatagatgaacgtcaattaattgatcctaataaatcactcaatgaaggtgcaatgacttttgccggttttcaaccaggaacttggcgttggaaggaatatggcaacagtggattatttgatttagacaaaaaaattaaagactacaccgatgaagaatatgatttattcatgcacgttccgcaacaaaaattaaaaaatccaccggcaaattggggccgtacggcattatatgaaggactagttccacgtatgctccgctctgttattcatagtgcctcaggtcgtcatcatgaagctgccttatcaaagattgtcactcgaaaaccttgcccagtatgtcatggaacacgtctgaacaaaaaggctctaactggtaaaattgctggcaaaaatattgcagaagtcagcgatatggatttagtaagtgtcctaaaatttttggataatatctcggaccccaaggctaaaacaatggtgcgtgaactacatagtaaagttcaagctttggtcgacatcggtttaggttatctttcccttggccgtggaactgatactctatctggtggagaagctcaacgaattaaaattgccaaatatttgacgagttccctatccgatttagtttacgtactcgatgaaccaagtgtaggactccatcctcacgatattaaattaattacccaatccttaaaaaagctcaaggaacatggcaataccattatcctagttgatcacaaccctgccattatttcgacagcagattatgtcgtggaaatgggaccacaagccggcaaaaatggtggtcaagtaactttcactggtacctacgacgaactattacggtcagatacgattacgggtaaaatgttacgagaaaaaatcactttcccaaagcctcgtgaacctcaatcttggctaaatgttaatcatgtaacttctcataatttaaaagacgtatctaccagaatccctcaaggtgtaatgaccgtgatatctggaccagcaggttctggaaaaagtactttagtccaagctttcaaacaacaagtttctgatcaagactatattgatttgagtcaggattctgtaggtttgaatattcgttctacacctgcaacttacttgaacattttaaatcctctacgaaagcttttcagtaaagccaacaatggcgtttcaacacaactatttagttataacggtaaaggtgcttgtccccgttgcaaaggtaaaggtgtgatgatcaccgagatggcattcatggatccaatcgttcaagaatgtgagttgtgtcatgggaaacgttatagccaagaagcactacaatacacttatcatggcaaagatatttctgaggttctaaatctttctatcaacgacactttagagtttttcaaagatgtgccagatatctacaaaaaggttagtctactccaccaagttggacttggttatttgaatcttagccagtcgatgaccactttatctggtggtgaagtgcaacgtgttaagttagcaatggaattgaatcataccggccgaatatatttcttagatgaaccaacaaccggattgcacttacaggatactcaacaattgatcgatttatttgaaggattggttgataagggcaatacattaattctgattgaacataatctgaaattaatttcacgagccgattggttagtcgatatgggacccgatgctggtaaattcggcggtcaagtttgttttgaaggtcatccaaaagatagcctaaacgataaaaactctcggactggtgctgcattagcagctataatttcttaaaagattcaaaaagatcacctcatttaaagtgcaacacaaaagttagacaaaattgaatatttttaaactgctaaggcatgttccctgtattcgcagggagtcatgccttttgttttctgtgatattcgtcgatgttcggacaaaaaagatcagcttcctttaaaatggtgtttaccacaaacccatcttttaggagctgattttttgtctagtataacctattccgaacgaattaaaatcgaaaccttttgtgaactagggctgtccaatatccaaatgggcgttcggattaattttacaatctacctcctattccatctgaaaatttaatgctcacaatttgtccgtctcctttaatttgagaagtaggatatacttcttttaacttagatttaatgtcttgtagtaaggcactttgtccattatttaaatatgttgtgaatctttgtttttgattttctggtaactttattaataaatctacatcacttaaatttatagctgttcctcgtccataggatccaaccaatgtactgtttttgctttctgaatgtatttcccaatattctaaattaataactttagtaatcttagcaacacgtttcaaaattatttcttcttgttcatctgatgtttttaaatttctgataaattttaaaaaatgtttcttagcgtcaaattctttcattttctgctttctcctttataattatcaacctttagtttctcaagaatttcactactaataaataaattgtaatctgtatttatttcattgtcgtgtctttcttttaactgtttatttgctttatcaacagacctatcagaagtaggtacagcttcagaatataaagagaagcgctcttgttctagtttttcccatatcaatttaatttccttgtctgacttaagaccaaaagctaaatctcttaatgtatctattagctgatcacgtagttttaattgattattggcatagactttagattgttttgccaatgcttgaaaatcccaagccttcaatattccagtactaataaaactaataagcccaacaagagcagtaaagattttagcataataggaattatttattaacgtagttatcgcccctgtagaagttaatcccgcagtaactaattgaatcaatgttaaccatctatttgaactttgatatgcctctgcttgtttttcttgtattttatgtgtccaaccaactctaacaatagcttcaagcaaagcactttgtaaaccgtctttcatttatattccccacactcatctttaatttgtttagtatttatcataatactattgtctttaattttaaatgataaattactattgcaacaaccctcgtgcatactattatttaggggaagcatgcagccttttagggtacccacaaagtaagacaataattacttattaaaaagcgatcagttcgatcttgactatgctagagcttacaatggattgagttatcaataggaaatatgcgaaatcggttgaatcacataatattagtcttgcgtatgcagaacaaagatggctggatgatgcgattaaattgaatttacaagataccaaaatatatattaacttagctaatctatacagtaagctaaattaagtctcaataactgaacagtttttgagacttatttaaaagtgtgctatactgggatttgtagagtctcatattcttagtctcagaaaagagtgatatttttggttaaaatttatggttatgcccgggtttcaacttcaagtcaaaatttagaagaacaagttgctcaacttgtcgacgctggtgttaatcctcaaaatatttattctgaaaaatttacaggcacaacaactcaccgacctatttttgatctactattaaatacaatctcgaatggtgatactttggttattacaaagcttgatcgctttgccagaaacacacgcgaagccttaaatagtattgaaccactgctagaacaaaatattagtattaaagttctcaatctagggactattgaaaatacaccaatgggtaaaatgattgttcgaacccttctatcagtcgctgaaatggaacgcgatatgattgtagaacgtactcaagcaggaaaagagtattcaaaaaaacacaatctaaactatagagagggccgtccaagacgtaggattggcccccatgaacaagctatctatgagtattataaaaaccattcaatcaaagaaacaattgcagcctttaatacctcaaaagctactctttttagaataattcaccaaatccaaatagaaaatctctctacatcagaaaggtagttacagaatcaacatgaagctatttagatatcttttaaatcacccgttaagtttgatgcgtagaagttcgcagcgttggtaacgtcttgtgttttagcatccggcatgatgttagcgccgtagtaaacaagagcctctgtcacattcttagaaagtggactcttaaggtcaaggtttttaatatccttaatcgaattaatagtatcgttatactcagaaacttgaccttcagtacccgtccgatagctaatttgaatcttatgagtcgtacctacaacattcgctagctctaaatcatccggtacattcatcgcaatatcttgtaacgcactattcaatagatcagcgttattcttcggatcggtcgttgggaatttaatcgaaaacttgtacgtaactgtatccccagggttaacagttgcttccgcaggtttattattaggcgccggttcatccggcccaatccatcctgaatttgtattcgctacattatctttaagattaatactttggctaatctttgccttattggatatctttttaagggttaaaacagttgtattaaatttccctttatcagcggcaacggtgttggtctgatccgtgaaactatcagctgttaacagcccatcgttgtttacgtcgccatccatatccgctgtaatcttcatcttgtagttcacaattaataattgtgttttcgacaatgaaacattcttaaccgtaatcttcttcgtgccggctgttgtgccatcactcatgacgacatccccagcagggagcgctgtcccctgaagcgttgctgtgacgccagcttggtaatccaacttgccggctggatccatcacaatgttatcgatgacaatattcttaatatcggtactattatcatcgccagcagtaaccatgaaacgatagtcgattgtatcgcctttaacaccagtttcggtcgtcttaaaggtggttgccgaatcttgtttcaattcttgtttgattgtgacgttatctttacgcacaatgtgtaaaattgatttgttagctggtgttttatgtgccttgtcagctactgttgaggttgctggcatatcacccgttaagtttgatgcgtagaagttagcatcgttcgtcacattttgcgtaccagcgttatcattgatcttagcgctgtactcaattgtcatccctttgccttttgttaatggcgtgaagacatcgtttaattctgcattcgcactgatgggattaccactaatatattgtggtgtcacaccatcaactgtgactttcacctgctttgtattatccatagaaccttctgggttaactaaagtcatcccactcgattctttcatcgcaatatctttcaaagcagtatctagtaaatcagcgctattcttcgcacctggtgcaatagcaaatttgtaatcgataatgtttcctggaacaccacttgtttcagctttatcaccagtcacattaggacctttccaagtttcaccagccgtattccggttcttaatgaattgcttgattgtcgccgtatttgaagccgcggctgtattcaaggtcgttgtattaaatggtgttgcttttaagtttgtggcagataactttgcatcgttggtaattgtattcgcgacatcatttacaaccttcatctgataggttactttaaaagtcgtattcttaggcaagtcgcttgtaatcttaacggtgttaccattacctggaacctgcggtgttttttcctgtacctctgagccaatcgtaatttccaatgaatcatcaatataagacatttcgtttggtttattcatgttaaaagaagaaagcagaagatcctttatagcgtctgtgttatccccagctttaccagtaaacgtatattgaatgatgtcattttgtttacctgacgtttcaacagcaacatgcgttgttgcatcattcttatcatttgctggtgtggttgtattactaatcgtttgttttagatcagttaccgttattggttggtcttcaatctttaattttgcaaggttgatttcggaagagactcttgttcgaccctgatctgatcaactatttgtgttttctttcgtcctttgaggttccgaacagggtcattgatttttttaagatttcgttctccaattttgcatcatataattcttgattctttttcgtcaattcttcacgaagttgatcgatttcgttcttgtttactaacttacgtaatttcttctgattatgtttcactttggtttttctgcctttcggatgaggcttcaaggcttctataccatactgattgaaggctgtcctccaaagactgatttgacaagaattaacatcaaattttgcggatacttcggctaaagtttcatcatgagtttgatagtagtttatcacatcaactttaaactcaactgagaaacttcgtttaactcttcttcgtttaagagcgtctgcgccgctcaaacgaaagttttgtatccatctacctacttgtattcgaggcaagttacgtttctttgaaagaagactgatactaatgtcaccttgaagatattcactaacgacttctgcttttaattcttaactatatttgaccatagaaaaagtgctccataactattagatttcttgtctaacaattatggagcactttacagctaatgatgcagttgatcgaccatttatttatctatcagcaggtgtcagtgctgagacattccgcaatgaactaactttcgcagggcaatcgcatacgaagtataatggtattttaggtgggcgtgcaacctggcttgagggcgttgaggtatatgcgcagaaaggtcgcactggtttacttgaatggcttaacaagcaaggaaagcagaatgttacagaattgaatgacattttgaatgaaggtgcaactccgtggtacgatttgtatggtggtttaggcaacatagaagtttttgacaaaaaagtaatgactgactaataggtagtcatcgttagacttttaattgattgacagcttcataataaacaactcctaaaaataaaaaaacagctggggaccgtttctccagcacagttcaagaaagaaacagcttagacaaacagcagatgtctagactgtttttttaagtagcattaattgacatgggctaacggataaataacaagcgcaactaggttaaagaaacaaaaatcattattcggctaaccgcaaattcatattaggtctacctttatttatttgtgctataatagaactcgaaaggggtcatgaatgatgcagaagaaaaaaatcgaattaaaagattatggtgctgctccatttgcaattgatttgaaagaagctgccatgcaaaatgacaactatcggacgacgttatggacaggtgatcattttcaagttactttgatggcaattccaccgcatggcggcgatatcggaatggagattcatcatggcaatgatcaatttatctatctagttgatggggtcggtcatgtccaaatgggtaaagataagaacaagctgacagttgatcgcaaggtctatcctggtgaagcagttgttgttcccgataacacttggcataatgttattaatgctggtgataaagttatgaagtgctactcgatctattcaccagtcaaacatgaacacggggttacagaaacaactaaagaagatgctattaagcaagaaggacaactagaaggtactggcgaataagcgtctagttattttgatatagtccatagccgaaaaagctctgacaaatgagttgactcatttgtcagagctttttttgtcatttaaagataaactgttagctaatattaaacaaactgaggtagttcaaaggaggataagaatgctattttaacgtaccaaccaactgattggaagaccgtctacattaaggagcacatcaccaatacttctggtcgtgatttaaaaggcctcttctttggtcgaacaattgatactgatttacggaatttttggactagtgaccaagggtcaggtgccattggagataagccaaaacttattgctgatggtgatcgcggtatgtacgagaaacaagatatttcagcaacagaaggtccaactaagtatcaggaagggaatgcttctttattttatgattttaatcttttcaatggttctggtcctgatggttggcaaggctttaatctcacaaatgcgcccacaagtatcccatcaacttttattggtaaacgatttgcgacaccacgtgcaaaaggagatcgaacgacgaaggtaaacatcgataccgaactcgacatgctctggtggcctaaagatttaaaacaaggtgaatcgcgggatattggctatgaagttggtttaaatggtgggggtcaaccaagtccaccggaaatcactttgaatcaaaagccgcgagtaatgtatgttgatggtagtcaaaaggatgttgtcttagacgggacagtgacgaacaaaaacccaactgattcagctgatcctaaatacaagaagatgaatgaattaatctattatgaagtgcaacataaagatgctagtggcaatgtcacgaccggtggccctaaagttctgacatcagtcgcagatgttgcggctggacaaaccaagaattattctggtctagctaaagggattgaagatgacctacacgtcggtgatcggattgttgtctgggctgtcgatagtggagggatgacttccgttaaccatgaacacactgacttagtagaacgtgcggctgagattagcaaaaaggttaagaatatcacgaatggagattcaagtttcaagaccgaaaccgactataaaccgggtgatacggttgaataccaagggacgttgaagaatcttaaaacgaaagtagccttacctaagggtgcaattattactgatgaattagactcaaacttgaccgtcaaaggtgatgtaacgttaacttactatgatgcgaatgacacgcagattggcgcagctcaaaccacttcgtttgatagtaatacgcatactgtaaaaactgctaatgaaattccagtcggcggttacgtcgtgattgacttcaaggctaatgttgctaagaccgcaacaggtgatattgataatatcatgcggtctaaggttactgttactgaaaaagatacacaaggtaatgaccaaacatatgaagttaatacagatccatcgaataaagcgataatccatccaggtgaagaccgtgaagttcaagatttaaaacagtacattaaacttgatgccgacactgattggacattagggacaaccggtgttactggtcatcgtaaggataaagttaactacaaatttgcatttactgctaaaacgagcaattcggctggaattagcgatgctgaaatcagcgacattaagatggcgcctgatgaattaacagcaccaacgaatgtaaaagttaagattataacgccttctacgactaaagccgatacatcagaaacagttgatgggacagctacaccaagtagtgatggtgagacttattccattaagattgataagtcaatcaaagctggtcaaaaggttgaagtaacattcgatcgaacagttaatgatgatgcaacaatcgatacgacaacaacagaacatgatcaaacagggaagttaacagcagcttcgttaagtacaccgattgccgataaggataactttaactgagagtagacctctcaaaactaaacaaagttttgatttcgcaaatgtacaaggttttccgtattattccttagaaaggaggtgatccagccgcaggttctcctacggctaccttgttacgacttcaccctaatcatctgtcccaccttagacggctggctccccgaagggttacctcaccggctttgggtgttacaaactctcatggtgtgacgggcggtgtgtacaaggcccgggaacgtattcaccgcggcatgctgatccgcgattactagcgattccggcttcatgtaggcgagttgcagcctacaatccgaactgagaatggttttaagagattagctaaacctcgcggtctcgcaactcgttgtaccatccattgtagcacgtgtgtagcccaggtcataaggggcatgatgatttgacgtcgtccccaccttcctccggtttgtcaccggcagtctcactagagtgcccaactaaatgctggcaactagtaataagggttgcgctcgttgcgggacttaacccaacatctcacgacacgagctgacgacaaccatgcaccacctgtcactttgtccccgaagggaaagctctatctctagagtggtcaaaggatgtcaagacctggtaaggttcttcgcgttgcttcgaattaaaccacatgctccaccgcttgtgcgggcccccgtcaattcctttgagtttcaaccttgcggtcgtactccccaggcggagtgcttaatgcgttagctgcggcactgaagggcggaaaccctccaacacctagcactcatcgtttacggcatggactaccagggtatctaatcctgtttgctacccatgctttcgagcctcagcgtcagttacagaccagacagccgccttcgccactggtgttcttccatatatctacgcatttcaccgctacacatggagttccactgtcctcttctgcactcaagtttcccagtttccgatgcacttcttcggttgagccgaaggctttcacatcagacttaagaaaccgcctgcgctcgctttacgcccaataaatccggacaacgcttgccacctacgtattaccgcggctgctggcacgtagttagccgtggctttctggttggataccgtcactacctgatcagttactatcagatacattcttctccaacaacagagttttacgatccgaaaaccttcttcactcacgcggcgttgctccatcagactttcgtccattgtggaagattccctactgctgcctcccgtaggagtctgggccgtgtctcagtcccagtgtggccgattaccctctcaggtcggctatgcatcacggtcttggtgagcctttacctcaccaactaactaatgcaccgcgggtccatcctaaagtgatagccgaaaccatctttcaaccctacaccatgcggtgttaggttttatgcggtattagcatctgtttccaaatgttatcccccactttagggcaggttacccacgtgttactcacccgtccgccactcactcaaatgtttatcaatcaggagcaagctccttcaatctaaacgagagtgcgttcgacttgcatgtattaggcacgccgccagcgttcgtcctgagccaggatcaaactctcgattaaaagtttgtagctcttgttttgttacttaatttatttgctagcgaaattgacttcgcaaatatgttgtgccccgaagggcgaccctacacatttggtttatcaaaactttgttcagttttcaaagaaaagccattgataatggatcaaaaacggccactagggtataccctattggtttgacttatcttcatgaaatgaggatgcctaaaaaagttcaatagcattgtccaaattagatgataattatcaatcaactagtaagcagaggcccttaagaagcttcaataacttcagattatgtatatctctaatgttcgaattaaaaaaggtacctagccgttgcgcggctaagcacccataaaaaagttaccaacaacggttaacagataaccggttgtttgtcattacaattactaacataattattggcacaataatctgttcaatgattattccagaatattgaacgagctattttagttttgtatccgaaccaaaagtcctattaagtcagtcaggtaaaactgcaaacgccctaactggaaaaccaggggccttttcagcctttggaacagaaatgaaaatataactaccagtagcaggaactaaatccaaattagctaataattcaacctgataatgattatgggaaagaacataatattcaccaatcaagccatgttcttgctttacagcagtatccgtatcaaaagtttcatgcccatttgctgaggcaccccgttgttcatagatgaatttcaaagcatctaaatcccatccaggataatgagcttgcttcttgtcatctaggttttcaaatttttcttgactaggccaacgttttgaccaatcagttcgtaaagcaacaaacgaattttcaggaattttcccattctttaatatcatttacggaaagagaagaatctgcattatttttagcttcattagaatgatcaatagcaactagtgggagaactaattctttgagagaaaagttttcgacatacttatcttggtgttcatcaaaatgaattggtggatcaatgtgagttccaaactgccctggaaaagtatattctttgacgtaaaaaccatcagaatgtgtaaaaatggttttaaattctgggcgtgcaaaggaaggaaaacgagggctttccggcccaaatgaatgggttaaatctacccaattaaatgattttaatttttcaacgacttctacctatacaaatgatgctgtcagtagatcgcgtcaaggagctaatttaattaccttagttgatggtgatgaattagtagatttattatttgaatatagaatgggcattagcgaaaaaacagtcgttgttatctatgaaaaaatatttccaaaagattaatatacagtctgcactggtttgagataaagagtgttagctttacccgttttttggtcgtggataaacgtattttgcttaatcgtaccatcggcgttaaagacatcaacctttttcagctgcatgacatcactgacccgtagtaaggtcgctttacccagttgaaaaatggtgtaattacgccgaccagctcgaaaactatccaacagcgtctcctggacacttgttaggacgttagaatctttgattggtaaaacaagttattgcaccataacctagtcacctcttttttaagcattagaatccaaccattataggcgttattttaagtataatctaaaaaaacagcccctaacaaatcaacttggtttgttaggggctgttttaataggttttcacaggggcgatttgttaatatagaccctatatattcatagcccctttctgtttggtgttaaagtattagtcatcgatgtcatgcactatcttgtttagctccgttttgatgatgaagtgaaccctaaatattggacgaaactttaagcagctttctgggttgtaaaaattcggtattcaaccggacttttacaacccagttttgttttaattcttgaaaaattataatcatcaatccaaaccgatatttgtgaaactagcgtttcataagtatcggtttctttttggtagaaagcttcggctttcataatatggaaaaagctctccattgatgcattatctaaacatgttgcttttcgagacatactttgaaaaatgcgatgttctttcaagatattagtccaatcttgatgctggtattgaaacccttgatctgagtggactgttgtccggtattttaaattcttagggattttcttaactgctcgatttaaaacagttgttgtaaattcaacagtagggtgtctgctaacttgatggctaagaatttcacctgagaataaatcataaatacatgtgaaataggcacgttcgtcaattgtcttggttccccagcgaacttcagtaacatctgtcactagtttttgatagggacgatcagtgaagaaacgacggtggattaagttcttagcaacggtcccaacattacctctatatgaattatacttacgagtacgtttgttaaatgcagttgatagtaattgtagttctcgcattaagacaagcacttttttatgatttactaagatattcatacgatgtaattcaccagttacacgacgataaccgtacgctggatgattcttcttgattgtttggatggcttgtttaacagattggtcagatgaaccgttcggttcatggctaataatgtattcatacgtacttttagccataccaactacttttagaatttttattaatttatgtttaagccttagctcttggatgacttgcgcttgttgtcttcttcttcctgaactaaggctcttaatttttttaggtattcattctcgatttgtagtaattcattttcttctctcagacgttctagttctgtttgctgccgttttttcgattgtttatcagctgtcataattgtttgccgtcctttggaacgatataaggcatcagcaccctcagtctcccaaatatgttgccattgccagatggtcccgacgtttgagatattaaaatgaagtgcggttttcggataagaagccttattcgttttcatccattttaaaacattcatcttaaatgagccatcaaatattttatcaggtgataggacatcgagtccctttagaccaaaggtctcataacgtcgaatccaaaaaagaacagatgaagaacttttaataccgtatttcctagcaattaatctgtatcctatggaggaagtcagataatcctgaacaactttcatttttaactctttagaatatttggtcaatataaaaacccccggtattggattttggtccaatatcgggggttcacttcatggcaaattacaagtttaatccgaacaagcccggaatctttcaatggcagtctgttgatgatgtatttttaatggtcgttgattaattagttcaagtgctgctaggatctcatcagtcgttacttggctaaaattggtctttttcgggaagaaccagcgtaaccgtctattaaaatattcattggaacctcgctcccatggtgaatatggatggcaaaaataaactttgatctgataatcctgttctaaggcctgataattggcaaactctttaccatgatcaacagtaatggattttacttggggaccgaaggcccccataaacttgccaaaggcggtgtttagagccttagccgttctattaggggctttgatggcccatagaagtcgggtcttacgttctacgaatgtaaccagacatgatcgtgactcacttcgactagaaagcaccgtatctacttcccaatgaccaaaagctaaccgttgattaacagttgttggccgttgttcgatggaagtcccacttgtaaatttcccacgattttcgctcactcggtgctggcggacattccgattgggtagatcagtcaatttgaaggggagccagccacgattaagccaattataaattgacgcagtgctcaagttataagcggccgcaatggtttctggtgaccaggttaatcgtaagtgattggtaattaaagtcgctaatgctgccgtcagcatcgaacgacgaccgcaattccgccttttgcgatctgcatcttgctgagctaattctggatcataaggtttaactcggtccaactcatagctaatcgtagctttggcgacgcctaaggcgtcagccattacttggtaagatttattcccctcattgaccagttgtgctagtgcgccacgttgaaaacgtgataaagtagatgtacccaaagtaatcactccctatattggttggaattagctactaccattgtaagtgattgctttgggctttttaatttctgttcggattaattatagaatttgccgaataaattacgttgtaccattttttgtgaaaataactagcatcgaaataagccgtaggcttccttatttgtaaaatagcggaaagtagtcagttcattccatggtttgtgtaaaaaagtgtctgtttttttactccgcttttatttttgcgtacgtcaaacaaacgatcccttctaattttaaaaaaattaagctacccaagcagttagataagctagatggtttttactgatcttatctttcgcaaaggctaacataatgagaaaagtcatcgtcacaaaaagattcagtttcttttttcctcgtatcgtatgattctcaaataggtaatctcgatcgattcgtccatttactcgctcaatagaggttcgctttttgtagattcgtttgaacttaaaactatccctagcgactttgttaaatatacgtcagtcttcttcacattttattctgaaaagccggttatcctgatattgagatttaaatccataacgtaaacaatctgttttcttatcatgtcccatatacgctagctttatctcatttcctttttcatcgacataggaaaccgctccgttatacgtataaattaaatctgtatctcgatattgttgggttagcgtatctttatcccactggtttttaatatcaataacggggatgatgtttttagattcaatgagacttaataatggagctccatcatatcctctgtcagctagaagatagtcacactgtttcgtttgtgaggtagaaaattgtttgatcagtctttttgcgaccgtcggttcgccttcagatgctttagtcacttcgtaggctacagacaattcataatttgcatcaacgattaaatgaagtcgataaccaaaccatgttttcttctttgttatcttctcgccattggctgtcgtagtggtatattgttttagtgtgaaatctgcttcagtatctcttctgccatcatgttctacttttttatttggttttgtagcataagaagggaaactgggaatattttctaaattgaaatgattatatatttctttatccttaagcatccttttttgtgccttatttaatttacactcattgttacccactacccattcatcctttgtacgtataaaggggttttgcgcactttcctttaacgcgttttgaacatcttcataaggtaaataaaattcaattgtagatttatttaattttacaatctaccatataacgtctccatcttttcaaaacgacttaattctacgggctataaataacttaatttgccagtgtataacgtttcagattaagctaccactatgttataataaccatatcgaaaggagatcaatctaatgaaatatacgaaaaccaaagcagtattaaatcaactcgttgccgatttgagccagatgtcaatgattatccatcagacgcattggtacatgcgtggacccaactttttgaagttgcaccccttgatggatgagttcatggaagaaattgacagccaactcgatgtcatttctgaacggctgattgcgcttgatggcagtccttactcgaccttaaaagaaatggccgaaaacactaagattcaagactggcctggtgaatgggacaaaacaaccccagaacgcctcgcacacttagttgatggctatcgttacttggaagacctttaccaacacggcattgaagtatccgatgttgaaaaagacttcagtacccaagatattttcattggtctcaaaaccgcaattgagaagaaaatctggatgattcaggcagagcttgggtcggcgccggaaattgatgaataaaataatattaaaaaatcggtaggcttatggtagattgtaaaattaatccgaacgcggtagattgcaaatttaatccgaatttttggacaaatttgtcagcataacctgatacggtgtttgccagtcgagtattttaagcggtcgctggttaatttggagtaacgtcgtcgttaaatcttgagcactaatgtgctcaaaacgagtccctttaggataaaaataacgtaaattccgattaaagcgttcattactaccacgttcagctggcgtataagcatggcagtaataggtcttaataccatattgtgattcaagtgatactagcccactaaactcagtgccacggtccacagtaaagctgtgcaccggaccattaaaagtggttaggaacttagttagtgcttcattaacagtcgctgtcgtccgatcttttaaccggtatgcccaaaggaaccgtgatttgcgatcgattaaagttaataaaactgccttactatgcccacgaggaccaacgactgtatctagttcaaaatcgccgatgcgattacgttgattaatcatcatgggacgctgttcaattgatcgccccaaagattgattatatttggatcgttggtcaacgttacgccgttggcgtacgccatgttcaggtagatcattcaaggagaaaccaattctcccctgatttagccaattataaatagatttagtagctagtttaaattcgtgagcaatcattcctggtgaccagcttagacgtaaatggttgagaattttttgctttaactcatcgctcagcttagttttccgaccacatcgtgatcgcttgtattcggcatctgtttgtgctaattcagcctgataaggttgacatcgagataattcataagaaattgttgacggtgatcggttcagatttccttgaattctccaatatctttacactgtggaaatccattaagacattctgttttaagaagatgaaagaagctttcaattggcgcattatcaagacagtttcccttacgagacatgctttgtataaatttttttcagagagtttatcggtatagtaattcaattgataatgccaaccttgatctgaatgaattattggttttattccttccggaatattttctgtgagttcatcgagtgtattcataattagtttactgttaagactattacttacttgaaatgctaaaacttccttgcttgcttcgtcagtaatagctgaaacgtaagcccacttagtatcggccaagcgtacttgtgtaacatcggtatgtaatactttgaaaggtacggtttcattaaaatgctgatgtagaacgttacgggccacttttccaactgtacctttataagatgaatatctaccatttctgtggcggttataaaggcttacttgaacatttaattcatccatcaaacgacgcactacggcgtctgatagatggatatctaatttaatgagctcttcttgaacgcgacgataaccgtaggttagacgtccgcgatatcttccgctttcggcaatttttagtatctctacttttacatcttcatacttatctacataatttttgatacgtttacgttcatcatgataagtcgctttcttaagtccaatggtcttaagaatatcgccgactttataccggttacctaacaacactaaagtgctatcatcaaatgaacgtgctttgattaaagaaaataaacggttaaaagaagaacttgatattttaaaacgagcggcggtgctcatggcaaaaagctaattattaaagggcgtgccctcgtgttagaagtcgtcaacgctaatttacttgctgggcaccgcattacgcgtatcttatcagtactcaaaattccgcgctcaacctactatgattatctacattggcagccaagtagaactgaacgccgccggcatttaattaaacaagaagtgttaacggcttggttaagatatccaatgtatggctacccacgattaacgatcttactaaatcaacagtctgatattcacgttagtcagcgtctggtctatcaacaaatgtgtgaattagggattagatctagaatggttaaacgaatcaataagccaaccactcagactgattatgatcagcgaccaaacttgattaagcagttaactgatcaatctggtattttattgactgatattacgtacattccccttaaccatacttggtgttacctagctagtgtctataatccagtaacccgacgggttattgcttaccaacttaatacgcagatgactaaagaactagcgactaacgttattacccaagtcatggcgcaagcagttaaaccacaaattattcatagtgatatgggaagccaatacacaagtgacttatttgaaaaccaatcatactttttataaaggacacaagattctagtatgttcccggaagactttcttctactttattcgaaatacacgaaccggatagattctgaccagtgtttccttcaacattcggttaagatgaaataacagtgaccaatgcaaacatggcgaacaggctattgtttccttcaacattcgattaagatgaaatttcttttaagaacgattcactagagtttaagctattgtttccttcaacattcggttaagatgaaattctctgaaacgtcattagtattgttctgcagctattgtttccttcaacattcggttaagatgaaatttaaacgaaggagcttccttgtttaacttagctattgtttccttcaacattcggttaagatgaaattttgaaaatcgaatgggtgaacgtcttttgctattgtttccttcaacattcggttaagatgaaatggatttgaatgttgaacagcagcgaggtctgctattgtttccttcaacattcggttaagatgaaattctcattaccgattgaataagcggtcttaggctattgtttccttcaacattcggttaagatgaaatctagtcaaaagcattaacaacaatgataacgctattgtttccttcaacattcggttaagatgaaatataatctttttccatacgctctaaacgcatgctattgtttccttcaacattcggttaagatgaaatattaagaatatttaatggaggtttagctcagttgggagagcgtctgccttacaagcagagggtcacaggttcgagccctgtaacctccattgagtcgttagctcagttggtagagcatctgacttttaatcagagggtcgacagttcgagcctgtcacgactcatcggccaagttacacgccaaaatgcgggtgtggcggaattggcagacgcgctagatttaggttctagtgtctatatagacgtgggggttcaagtcccttcacccgcattcaattgaatattcaatgaaagttatcttattatgccgacttagctcagttggtagagcatctgatttgtaatcagagggtcgggcgttcgaatcgtctagtcggcattaagatgcggaagtagttcagtggtagaacatcaccttgccatggtgggggtcgcgggttcgaatcccgtcttccgctttcattatgattaagccggggtggcggaactggcagacgcacgggacttaaaatcccgcggtaggtgactaccgtaccggttcgattccggtcctcggcatcataatgaaaaatgcacccatagcgcaactggatagagtgtctgactacgaatcagaaggttgtaggttcgactcctactgggtgcatataacgggaaatagctcagcttggtagagcacctggtttgggaccagggggtcgcaggttcgaatcctgttttcccgacacaaagaattacatcgattggtttaacaatcgacgaatatcacagaaaacaaaaggcatgactccctgcgaatacagggaacatgccttagcagtttaaaaatattcaattttgtctaacttttgtgttgcactttagtatattgtttctgtgctagtattttttgttaaaaatcagctgttgagtcaggaggaccaaataaatgcaaaaaaattcagaattacttttaaacaagatgagtaaagcgtatatggatcctgaggtcgaagaaataccggagcttcaaaaatatttactgatttgtgcttcaaagcttaataacgacgaatcttatagtaaagttgttgttgaattgtccagcaagatttctgcttattatctgagacatcacaatgttccaaagagtgtgttggaagtttacaacttcatcaaatctgaggtaccagcgggtaaaatagatgctgctgaaatgagaaaacatgtaatgggtttagccatattgtcttttcctattaactttggtccgttttaacaat
